United States Patent Application Publication US 2022/0211063 A1 - sequence listing, part 23

SEQ ID NO: 56 - DNA, 7752691 bp, Penicillium roqueforti (residues 5,814,520-7,752,691 of 7,752,691)
  misc_feature (471)..(2988): n is a, c, g, or t
  misc_feature (125072)..(125245): n is a, c, g, or t
  misc_feature (177056)..(177831): n is a, c, g, or t
  misc_feature (384173)..(384363): n is a, c, g, or t
  misc_feature (555910)..(555935): n is a, c, g, or t
  misc_feature (601324)..(601424): n is a, c, g, or t
  misc_feature (676814)..(677158): n is a, c, g, or t
  misc_feature (719555)..(719754): n is a, c, g, or t
  misc_feature (1142719)..(1142936): n is a, c, g, or t
  misc_feature (1186267)..(1186889): n is a, c, g, or t
  misc_feature (1335750)..(1335921): n is a, c, g, or t
  misc_feature (1623850)..(1624038): n is a, c, g, or t
  misc_feature (1638010)..(1638177): n is a, c, g, or t
  misc_feature (1653190)..(1653311): n is a, c, g, or t
  misc_feature (1825514)..(1825694): n is a, c, g, or t
  misc_feature (2226312)..(2226460): n is a, c, g, or t
  misc_feature (2393310)..(2393476): n is a, c, g, or t
  misc_feature (2448029)..(2448167): n is a, c, g, or t
  misc_feature (2535304)..(2535417): n is a, c, g, or t
  misc_feature (2536977)..(2537199): n is a, c, g, or t
  misc_feature (2854098)..(2854136): n is a, c, g, or t
  misc_feature (2984508)..(2984757): n is a, c, g, or t
  misc_feature (3020810)..(3020969): n is a, c, g, or t
  misc_feature (3033643)..(3034020): n is a, c, g, or t
  misc_feature (3159237)..(3159358): n is a, c, g, or t
  misc_feature (3215468)..(3215733): n is a, c, g, or t
  misc_feature (3224528)..(3224830): n is a, c, g, or t
  misc_feature (3317372)..(3317652): n is a, c, g, or t
  misc_feature (3542053)..(3542228): n is a, c, g, or t
  misc_feature (3623060)..(3671559): n is a, c, g, or t
  misc_feature (3674099)..(3676135): n is a, c, g, or t
  misc_feature (3690909)..(3691143): n is a, c, g, or t
  misc_feature (3731654)..(3731912): n is a, c, g, or t
  misc_feature (3988980)..(3989155): n is a, c, g, or t
  misc_feature (3991939)..(3992050): n is a, c, g, or t
  misc_feature (4101299)..(4101736): n is a, c, g, or t
  misc_feature (4338887)..(4339016): n is a, c, g, or t
  misc_feature (4339394)..(4339698): n is a, c, g, or t
  misc_feature (4384061)..(4384223): n is a, c, g, or t
  misc_feature (4533678)..(4533904): n is a, c, g, or t
  misc_feature (4697041)..(4697211): n is a, c, g, or t
  misc_feature (4793826)..(4796541): n is a, c, g, or t
  misc_feature (4802143)..(4802515): n is a, c, g, or t
  misc_feature (5082574)..(5082717): n is a, c, g, or t
  misc_feature (5096756)..(5096912): n is a, c, g, or t
  misc_feature (5239501)..(5239639): n is a, c, g, or t
  misc_feature (5277854)..(5278038): n is a, c, g, or t
  misc_feature (5381189)..(5381388): n is a, c, g, or t
  misc_feature (5479369)..(5479800): n is a, c, g, or t
  misc_feature (5512360)..(5512556): n is a, c, g, or t
  misc_feature (5631285)..(5631372): n is a, c, g, or t
  misc_feature (5721770)..(5721994): n is a, c, g, or t
  misc_feature (5728887)..(5729032): n is a, c, g, or t
  misc_feature (5774080)..(5774169): n is a, c, g, or t
  misc_feature (5808546)..(5808590): n is a, c, g, or t
  misc_feature (5833022)..(5833139): n is a, c, g, or t
  misc_feature (5846579)..(5846770): n is a, c, g, or t
  misc_feature (5859707)..(5864428): n is a, c, g, or t
  misc_feature (5865409)..(5948408): n is a, c, g, or t
  misc_feature (5948989)..(5949423): n is a, c, g, or t
  misc_feature (6008477)..(6008565): n is a, c, g, or t
  misc_feature (6324500)..(6325221): n is a, c, g, or t
  misc_feature (6373350)..(6373710): n is a, c, g, or t
  misc_feature (6805689)..(6805691): n is a, c, g, or t
  misc_feature (6847122)..(6848137): n is a, c, g, or t
  misc_feature (6999671)..(6999803): n is a, c, g, or t
  misc_feature (7043433)..(7047240): n is a, c, g, or t
  misc_feature (7056977)..(7057482): n is a, c, g, or t
  misc_feature (7108384)..(7109155): n is a, c, g, or t
  misc_feature (7114292)..(7114980): n is a, c, g, or t
  misc_feature (7152070)..(7152265): n is a, c, g, or t
  misc_feature (7347420)..(7347526): n is a, c, g, or t
  misc_feature (7355683)..(7355687): n is a, c, g, or t
  misc_feature (7379165)..(7379439): n is a, c, g, or t
  misc_feature (7441586)..(7441811): n is a, c, g, or t
  misc_feature (7524935)..(7525054): n is a, c, g, or t
  misc_feature (7750548)..(7752461): n is a, c, g, or t
gagtctacagacgctgaagtaaacttgcctaaagaatatttactccaggtactggacccagtcggactccagacagattggtcgtctaggctggtacggctggagcccatcgccgaaggaggatagagcctcccagcccgagagcggggtttggatgaccatcgtgcagctccatggcttgaattggcggaacgaccacgaggaaagatatcagaaccactcttgctaattgtgctagggctcctgcgaagagtgttgctagaggggcccaaaaagttgttggaagacatgcgagatacttcacgttctggttgggcaccgaacaaaggcagtttttgcttttggatcgatgtgtagaattccttgagtactgcttcaacctgttgctcccaggctctcactgttccggtgaatggcgtattaaccaaaggcccaacatcatttgcaccgccgtctctgtcaaacaagccgtgggtgacctctgaagggaaagttgcagagcgtgccgacgtaggggcagagtgcgcttcatgggattgagccttggaccggttgactggacgcaacgtctcaaatccctccggtgcggcatccattgcgactcggtgtatagtgggcatggtatttcgaacgaattgagatttggtcatttttgaatcgatgtcagccatatgcagatcagtgtttagtagcaaaatagaatagcaaatggtatggacaacgtcagtagctttgaagccatgactcgggttgcaatcacaccatctggtggaaaaggcatccagcactcgatccacttgttgagtttctcccttgagcaccaaacggtcgcaaagagcccgaagagaggccacaatgttgagattagaccaattgtacagtcgcatgtatgcttcacggaccattgcccgatcagggtcacccagccaagcggcagcagactcgttgcctaccatctggtcctggctgtcgaagagcctctgtgcttgttctcgatctgtagctgtgggtccatcttcaatagcttcgccaggtccatctgcctgatcttcggtgtcatcagactgagagtcttcctgttcaatgagtggggtgttcgcagcggtctgataattcgatgctgttgatatagaatcaacaggagattcgcaaaccctgtcctcggacggaagcgccaatctagcgacattgatttgaggaattgcgacctgtgatttgatgctgcgcgagaaattttccacaacgggggacagggtactagaggcagtaacactctgagacttttcctgcaaagccaagtctgtgaagacttcgccagttgaagatcgatccttctctgtaagaggcgagatgtcctgaccacgagaggcagttgagggctgcagagaagtcttcggtttgggagctccaggagctgaaacactttctcttttcttctgcgcctgcaaaaatgccggttgtcgaattttagcctcccagtccgcattttctttccggtctgattcctcgtcgagataaggattcatgatctgccgcaggctactcacagggcttggagccgccatattatccatagtctgtggtgcaagatgttgaggaataacaattgggggaggagcatggtcaggtaccgacctctttcttctacggaagaacgaagatttcttgttcacgacctgatggggtcctgtgcgagttgaggacggagaagcacctgcagggctcttaactgcttgctgaggtcgtagctttgggctggcagtcatcccattggtttctctactctcattttcttgtaaatgtgacagatcgttggcgtttatacttgctgcatctgccggtccagggactgaattcttagatccaaatacacgccggaagaaacctgggcgttcttttgtgattggagcagtatagttggtggagatgttggccgaaattgtggtggttgccgttgagtctgggggaggaaaagccggcttgttataggagatggtcggactgggggcaggcgagtccaacgaagccgcaatggtcggagggaggccaaaatccgtatcatccatattctggaagtcgttatcccgagctctgagagttcccgtggcgagattttcaggccgaacctttcgaacctggggggcataagcagttttcaaactgttccgtcgcggtactaccggtgtccgcgcggcagcagttgctggcgtcctgccataatcgtgaacctttcgtggtcctgccgggacacttggggtgggtgcagcatcgtgatcgttgtacagcgtcaagtcctgcccgacactgggatcagcataaggtgcgaacgctcgttttggcccgcaatcgaagctggctgaacggcggcccaagccatgatctgctcgtgctcttgggattgtgtatgagtagtccgcggtggaggatgagcttcctttgctgtcttttcgggtagtatttgttcgtggcatagttccgatacccccgcgcgagcttcctatctgcctcggtgtctggttattggagctactgttgctgcgtcggcccttcgctgtgattgttgcgtagcgatcattcccatcttcgtatccgtagtctggttctgaggacactgacgaggagaaggtgtgtccgcggtaccggccgtgcgaatcggattcttgtgagtaatgactgtgatggtcggtttcgaaggcggaattgaaaagacgatagtcgtccagaacagacgaactagaggcgaattgatcgagcgaaagaagcatgttgtcgacgatcgacgttcgtgtagcatgttgcggggatagagagagatcatgcgggtctcgatcatccgactcactggttctcgctggattatccatgacatctgggaaagcatcgcggatggaaggtcgctctgggtatcctcgtttggagggcttgtatcttgcggtttgggagggtggtgtatggggaggagagtacgcctcccgttgggacattattgcgctaaccaatgttaattattttattccttaggctgatcagatttccaatccacacaaagggaatgacaggctcattgtagtagttgaggggggatggggggattcggagccactcggtttccaacataccagatctcttgcaggtctcacaaggtaattgactaaactgaattcgacctgcagtatccgatttgacgaattgaatggtaattcacttggtcattgtcccacgaggccagggatgtaaaaaagaaagaagatcaaaggagtgtaaaagggtgggcaatagcaagaggaacaagaaaccgggggtggaacgaactcctgagagtcggggaggttaggcgggaactttttaaagcctctccgctactgtattggtacttttttataatatgagacatacatagttaatcaggaagaatttaacatatgatattgaatagaaacatgcgaagggggaaattgcttgggtttttagggatctacagattcaggggtttcatacatgcatattcagggcttatatagttactttaggtcgacttgaatagtagtatgttataagatatggatattagacagcatatatcaatgctctttgccttgcaatccttcaagcacaatctacaatctacaatatgttgtatagccaaaagtacacaagtggagctgtggggatggatcatggagctctttgtatgttgatttccgtgaatagagatagatctccgtagagacagttatagacgaatgcctgtgtagatataagtgaatcccagactaataactagagcactccctatatctctttcacggtatactaccccgtatccatgtgaactagtgtatgtataactcaagtcttatagattggccccttgcagagtggattatctggagaggaacccttttccagcggcaatgacacctgttcagaagagacatgagttgagatctatctagattgtaaatcctagtagaagagggtatcttatacagagtactgtgtccatcaggaactacataaaacataaaatccaaaaatcaacaaatgaccgatatacccaacacgtgatcaagaagatgacataaccgggcccaactcgcatcggatacacgtacaacaattgaactgcattgtgaatgctccgagattgatttccctcctcgaaaacggggtctaagatcatgaaccctcacatctctgtcccccgccaacatgccggccctgccaacttcggctcaacacctgcaacccggtctagtgtccgcatgccgcgcttcttcaagaggtagtaggaccaaagaatcccggcacgagagacaatcactgatatgggacaggcttttcaaattcccacaaatggactttgaaatggcaatttgggagatgacctcgttgctgatcgcacccaagaaggtattcaaatcgatatactaccatgtaagtggtctctatcctaactggccctcgaactatgctgatcatgctatctgatttagaaacgtgagtctacttattattccaaacttggctagtgcctcgattgaacaagcacatacaactggcaataccggttactatcgtcccagccgagcactattgacgccttggagcagaaaccaaaaacacatggcaccggcctgatccgtcattcacctacctactatcattcttcctcctcctcacagccctcgcatggggccttgcttatacgccaggcttcggcgcaattatacgactcgctttcctcttcgtgttcgtgcatttcatcggctcgtcactgctcgtctcgacaattggatactttatcattggccgtctattcggtccgaacggagctgccgcctctctagctggcctgcggggctcccgtggccgaagacgaggtgccgctcagggcttgtttactcagccaggggagaaggagcaattggagtttggatattgttttgacgtaagactccctgccataaattccgtggaatctccgactcactgacactgtcgttgcataggtatccaaccgggccttctttcctctatatctccacctctacgtggtgcagttcctccttctgccgctcctcacccgcagcccgagtaatttcctggctactttccttggaaactcgctttacctctctgctctcatttactacacctacatcacgttcctgggatacaatgctctcccattcctgcacaacacagaacttctgcttgtgcctatcctcatattcgccgttatgtggctagtcagcctgattgccggttggggcattgtcatgcaaggccgcagcgttgaggggttgttctggggcgtgtgaagtagcaagcttcccccgaattatatcctctccctgggatttccattccctgtacgaaacctgaaatatctcttttgtcgggctcatccctcctcgaaaaaaagccagccccaaaatgaggcgattatctaatgctatgggggcgtcagtgtacatgatttcaatttacatgattgcgcatatttcctactgtttgattgattccagatgtccaatgtgaagagtatctcaactgtttgctttgtttttttttttgttgtctagatgtgtaaccaacaattcgacccaagtcatgaccacatataaagcgaaatccacaagcttatttcttaccaactttcttagtcttccccgaagctgcagcacgcaaacgatcctctcgctgctgagcggcatcggcacgctctttggcttgctcgtccttctcctccttctcggccaacttgcgcagacgctccgtctcacgctgctcacggataacggcgagacgagccagatccgacttcgcctcgtcagtcttaccctcggcgtgcagcttctggtaacgttcacgggcctgctgggcctggacggcctcgcgctcccgtcgggacaactgcgagatatccttgaccttagcgggcttcttgggctcagcggcggggtcggcgacgggcttcagggtctgcgagcgggacttggcagtgtggttggggttggcggggagctcgccgtcggattcttccgagtctgaagggggtaagtcgcccggttgggcgggtccttggcctcgcttcttcaatgcggctgccttcttagctttggcagcagcgcggcgctcctcgcggcttcctgcagctgtggatgactcgatcggcttgaactcgtcctcgctggattcctcggagctttcttcttcggatgaagaatcttcgtcacccgatgacttgatttgctcaccaggctcctatgagagggatgttatgatcaggatgctgtacaaattgagttcattggggctgaagttcacttacccgccagagacccatttgattgccatccttgtctaatggctgaagatctctgctgaagtgcttgcctcctattcatcgtctgatcagtttcaagtatctcgtacttatgctcaggcgcacacgacatacctcctcgagtaggcttggagaactttcctccacgaccacggggcgccatattgatatgtaggaaatacttgagagcttgagagctttggtaacaaggctgaagtaatgtatatctctatatcgagaacgagttagcgggttctcattgaggggggtttcgcacacaatgaatggaggggcagaggcggggtgtcgcttcagagttcctccaggatgggatcaaaataacaaatcacttacatggagaattcaaagtagtttaaagatcttcaaatgttgtaaaggatacaaaaattcgaagggaacaagttcgcgagttgtcaagtcaccgcgctcgcattaaatcacatgtggagacgtttttcttctccgtcaaaccacaagtcgttgatttgttaagacatacaacatgcaacatacgacatttgggatatatgtatagcattatcattatatcttctatattcctatatactatctattttatcatattctcattcatcagactcgagctataccagtgcccaccttggtcactcgagccccaatcaacgtcaatccaccaaggaggaccgcagatcccatgaacatctgggcgtacaggtaattgccattatcacgaacaactagctcaccagcaataggagaccctatgagggctgccactgccaccacgctgagtaccatacccatgcgtaccccgatcttcttcatatcagtcgtgagggtgctgagggtcgctgggaacaacgattgaatacccgcagcaaagaggccataaaacacagcaaatgtccatagcccggacaggccgtggactgccgcccagcagtagccaaccaaggccgtcgcgaaactgaacgggatcaacaggttgagaggaccggtgagctgatcagcaagcaggttggggaccaatcgcccgaccaatccgactccgttcatgactaggagcagatcaatagatcgatcacttgacacgccgatgatgttccgactgaaactgccgatgtagaaaaagccgacatacaggccccagaagttcatgaacatgccaatcgcaaacagcaagtagggcagctcggtgaaggcagcccactcgacaatcggaccagtcttacgtggaggaagacgctgcttaaggaacagcacacagggagtcagcgtggctaccgagataaagcccagcgttcgtattgtccacccatatccgacatggggcagcatcttcatgacaacagccgggaagaccaggccccccgtcgcagagcccgatgcaacgaggccaatagcgatgccacggttcttggcgaaataagtcgagaccaaagctagggttgggcagaacatgagaccacacccaattccttggccaacaccctgtgctaggaatagctgccagtactttgtgcagagcgaggtcatgaagatactgaagcattctaagatagcaccgcaggccagagtaaatgtgaaataaccggcatcggtggccctgccggagaaagtgccaataaaaaacaacaaaaagatctggatactcccaacccaggagatatctgagggcggatgtcccagtgtctgggaatagtatgtctggaagacgccgaagctattgatataaccccatgtattgaagatgacgaagtgtgcgagggcaacctgcgaccaagcctgaaatccgccgtccggaggcggcccgagatctttgccagattcccgagtgcgcaccgccgagagggtacggctcaaggcgctggtgttggttggtatgtgggaaatgttgagttcatgtctgatggttgattcttcatctgaggaatggcgagtatggtctatgtccttttcgttctctgtatgttcttcggtcatacttgagggtttcttggatatattggccatgttagaagttgacatggttccttgatgcgccttgtacatgtaggagtcttccaagataacaaaaaacttgtcaaatgagtcaagtcaaaattggggaaaaattcttataacggggatctttccgatcgtcgttcgcagagatggccgcgcccttcggatgacaggtccacttccgaagttgtaagcgtatctttttacgttgcatctatattgtatctatagctaactcctattttccaagttgaatagcctctaatatctacattatacatgtatctatatatcttatattgaccccacactcacttgatatggcgcaatcccggggtccccgcaaaaccggctctctcggatagttctaggtacgtctactctttgtatgtgacatgacatttcagggaattcaatggctttctttctagcacgtaaatacatgtgagtctatacaaaatcatggcaaaaaaacctgtcgtaggaaggtgaaaagcaagggagcataaaccggagccgagctaaacccgtgttggcggaggtaatgcttggatagcaagcaacctttgaactagtgcagtgtcttaatatgggactaatgggccgctagcaatagatcaacccatcttcaagatcgtgtgataatttccggcatgcggacctgaaacggatgccaaggctagattccccgatgaagcatggcgtatacttggctgtggcgggtaatcatcggtttgttggccaaagtcttgttcaaatctcagtgatcttggttggcgctgctaaaaagcatttgaattgacccaataacatcggccggttccaataagtgccagctggcatcggtctgctttgagctggcgcccaccgtaactgagtaaacgtggtcgcgtggtagatcaaacttcttgagggctcggaacatatctaaattgaatgttaatccaggatctcagcatcaatcaggtgggcaattttaccttcatcggtgaagtcatcacccaaacataggatgaagtccggtgccttccccggggccgtgccatattcgtcaaccaaccgggtggcgataaatcccttgttcacaaaggttggccggacctctagattggccttgcctgccatgacttccacatcccatcgtttggcgacagtgtcctccaaagcctttcgacactcgcgagcctggaacgcaccgtactctgggtctgcacgacgatagtgccaggtcaatgctacccgtttccgttcaatgaatgaaccttgtgttcgctctgtgtaatgttggaagacatcaaccacttctttctgccatcccatgtcgcttttctcggctaaattctcccaatcctcagatccgggctttcggataaaacaaccgtgctcggcactcaatcctagttctgggatatggcccatccactcgtccaggaaagcctggtcccgtccactgataatccacacggcatttcgtgggtcagccgataggctcttcagagtacggagtacccgatctgaaggaatggctgcctggggatccttgacaattggtgtcaatgtgccatcgtagtcgaacatgaacagtcgtcggcgagccttgcggtactgcttcattagttttgcgcgatcgagtgcaggtgtagcgacggattggtcaaaggacgaaaggttggtcagtaggcgattgaggaattgcctggaccacatggaaactgtgttggtcaccacatgcttgtataactggaggtgttgctcctttcgctggtcggctggcatagtcaatgcttgattgatcgctccagccaccccgactagatcccacgggttgatgtggatggcactaggcagggtgcccgccgttccggagaattcggaaagaatcaaagggctgtggttggtttgttgacagacaatatattccagactcgttgtgttcatgccatctcgcaccgtagtgatcaagccgacatcggctacacgcaacagagcgaaatactcgcgtggagataagtattgcggatagtactgcacgggcgagaaactcaaagagccaaatcttccgttgatggtcgaaaccaaattggatatttggccagcaatcttgttgtcgtcttccttctcctcttccacgctagttggactggtcacctggatgaggacgactttgtcacgccattccgggtagcgctccaggaaaatctcgaatgcctgtagcttctgcgcgacgccgcgaacactgtcgagtcgatcgcggccgacgatgattttctttccagcgtagagcttgcgaatgcccaacacagtcttctcgatatccggagccccaaaggcggctttttgaattgaacgtgcgtcgatgccaataggaaagacatctactgcaacatgggcgccgtaggcatccaccccggcggagttggactcaaagcccaaaacacgtgtgcagcacgaggtaaagtgtcgagaataggaaaatgtttggaatccaatcatgttggcacccaggactccctccaggatctccttgcgctttgcaagacaccggacgaattcgctgcttggaaaaggcgaatgtaagaagaatcccacgtagatattcgggatacgttgccgcagcagactgggtagaagaaataaatgataatcatggacccagaccacgtctccttcttgatattcctgcacaatgcgatccgcaaacaattggttcaggcgcaggtagtcggcccaccaccgtcgctcggatcggccatctgtcgggccatgttgcttgtagtggagtagaggatataactcacgttcggcataacggcgccatctcccttggtctttcagcataatagtctcttctggttcttctgatgcatccgacaaccacacaggcaatacccggccatgacggcctgagctcaattgttcatcgagtcgttctcggtcctgttgggtgacactaattccctctaccagcggatgagcgggtggcttcttggttccgtccacgggaaccggtgcggcagccttgttcaatgcttggttggcaacaaggttactgggggttagaggtgcgactacagaattgggatgtatttgctgcaagggtgctttcatgtccacatcaggctcgacctctccggtccagcctactaaggtgtgagaccaagatgtctcatcagatgcaagatgtgcaaatgaatcgaacagcgccgaagtaccggagcgcgatttgagcgtctgtgatccggtcagccaatacgatctcccaaatagacggagtcatccacgtacccagtctgatcccgatcgaaagctgagcttgtatggtatgcagaaagcggcactgatgagacggccactcaagcgaagtcctgggtgttctaggcgtggatcagtctcgggagattcagcggtcaagcttaagcggcgcagcaaatctatgccggatgatgctctctctgcagtctgcactggctctgacttagtctcagacgggtcggcggttacagcgttggccctggggagattgttaaagtatgaaggggcctcgctcgacgtcttctccagactgggtgtcgcatttgtcgcttgagtgtacgcgtcatttttgagagcctttaatccgggcccaacgaggacggggtttggctggtcatcgggcacctgcgcggggctctctgattcagacatgacgagcagatgagcagatgagcagtcaagcagtcaagcagtcaagcagtcaagtagtcgagcggtgcttatgacgggaagatggaggatgagatccggtatggtttgattagactgtgggagttagactgcaattgttacatgcaccaaggtccggggaaagcttgacgtcggtgggttgaaaatggggagatgatcaaggctacatacctcgggggattaggactgactggataagcaaggtcgggaggggaatgaactatgacagcaaagccatggacgatgtaaagaagatgatcaaaacaaaaacagatcgactataaagaaaggaggaacagggaatagtaaggatggaggggcaagcggtgaagtaaagtcgtcttatcgagagttatcgagggaaatggcctggaaagcgattagaccacttttcaggacaagatcttcgggttgacagtgaataggggaataactagaaaatagaaacagttcgaagacgaagatgaagagagtatggagggggataggtggatatttcctcagtgctacgtcatgtatggatttctttctctttctatgcgctgtcgtatgaggtcctctatgcacttgtgatctagatggaggtttcgatgtagaacattcatccatgcaggtatacatcgcagatataaaaaaacagaacttgttagaatgcaacccctttgtcacatggcggtttcggcctaaggcatacattctcaaatagttcaagttgtgcaaaatacccttaggaacctgcatgcatcctcggcatggtgacatccactccggtgtcctttgctctcttcaaatgccctaagactgttatgcagcttccgagcctacctttacgcatccgtccctctcacctctttcgtccattccatagctctgttgcggtagccaagacccccgatgtctttgccaacagcctgcgaaagaccctagaagcccatcggtccacaaatcggtctcgtttgattcgcaaaatttaccccgttgaagatcccgccggactctggcggcctgagatcccatctaagagtcgcgcggactaccaaccaaccgtggaaccagctctgccggactcggaatattcgccggatactcctgacccggggtctaaaagacgccagaaaaaacgcgcaagtcttgttgatataccgtctcaccaatcactcatcagtcaacgtggagaagatgcgattcaacctgcagggacaggtcgtccggcacagagtccatggttgacaaatttggagctatctcgcgccaatgccgagatcactctggatgcagaaattcgagcattgcatcaatatctgagcctaagagctcgggaacgagaccgcgtagagaagctcaggacagaggtagcttcacttctcaaaacagtggtcccacatgctccaagagtcattggatcccactgcactggccttgtactggcgcactcggatcttgactttatactcccatatgaagacccttctagatcactagaacgtgatcgaagaccaagccctacgcggcctcagatccaagatgcccacatccgccttctgcgtcaagtccaaagagctctacagcacaccgatatattcgacaatgtcaaaatatctgacaagcgaaacccttcactatcagctcgccaccggccgactggactcctgctacaattctattgtggcgaggatatccctgccatcacggagtatctgcaagattatcaggccgaatatcctgccctgcgacctctgtacgcagtaacacgtacactgctagaggcgcgtggcctttttggctcatcgcaggcgagcgttgggccggatgcgctagccatgctagtcgtggcattcctgaagatgaaccatggccggtttcccgggccaaatagcttgggtgaccagtttcttgctcttctacagttctatggtactcaggttgacctcaagtctgtcggtgtcgccgtggatccccccgggcttttcagcacagacatgttgcctgtagctcgcggggctgatgaaactgcccaccagcgcggtcagcgttctctgatcaacgtcaagcggaccgctgcgggaaagctcaatatgcctctcttcatatttgtgttgtgaaaagcagcaccctgcaagccctgtcactcttgatctcctgctttccagtgcgatctcgggttaccctaatattagaactttagcaaactgccgggccgactggtttctagatgtgcaagcggataagccatgagaagtcatatttagcggaactttcttgttgcgcaacgattatgcatacaagaccctacccactacatgaatgatctaggccggtcgtgtactcggacttctgagttacagagtgcatttgcagctgcgtgtcagcagcttcgtgacgcatgtgatgaatgggcaagcgatggcaatatcaagagttcaagtgtccttgccactactctacaggctaattttgatggactagagaaggtgcgcaatcaactcgcgtacctctagccaaaggaagttgtagtctagcggtagatcgagcgatcggctattcaaaataatatcgcctatacatctggccaacacatgtagaactcgctatgcgatgggtctcgtctatagttttggttatcggagtctctttgtggtcactggacaaagaaacactggatgtcgttgtcccctcggatttctacaacatattcataagcaaagcaatttcgattccctctcttagtttcatctttcctcttgaactcagcagcaagacaaaagaacgctgaaggctacgttctcactcgggggtggtgcccatttgattactaagtctgtttcacgcggacgcgacgcgacctcgggcttatcagttcgtggggttttcgtggcagaaaaccgcgacaatcagtcaagactgacgagtccgttcgctatgctagccgctggctttggttgataactatttcttcaaatgtcatcccgcaagcgcgtgcagaagtctacggactccgacgaagaaagcgatgggtccaaccagccggccatgagttcttcagtacgattccagcaagtataactttaagcagagctaagctaacagtcacagagaaaacgacagcggacaaattcagagagctcaacaaactcggaatcttcaacctcttctggcgctgataccaataccgattcacttctagcagtcaacgacgatgcacttctcgacgacgaggacgagctagagctccgccagacccagatcatacaagaaaaatactcgcatttgatcgacgaggccaatgtgcccgccgatcatggaatcctcgaacgcgttgagtgctacaatttcatgtgccatgatcacttctacgtcgaacttggtcctttgatcaactttattgttggaaagaacggtagcggcaagagtgcgatcctgacagcgatcaccctctgtctaggtggcaaagcctctgcgacaaatcgtggccaaagtctcaaaagcttcatcaaagagggcaaggaaaatagcacgatcatcgttcgcatcaagaatcaaggcgaaggtgcctatttgtcagacgattttgggaagaccattattgtcgagcgccatttctcccgaagcggcaccagcgggttcaagatcaagtcagagaatgggcgcatcgtctcgactaaaaagagcgagctggatgctatcacggactatttttccctgcagattgaaaaccctatgaacgtactctctcaagacatggcccgtcagttcctaagtacatcaagcccggctgagaaatataaattctttgtcaaaggcgtccagttagaacagctcgataacgactaccggttggtggaggaatctcttgactcaattgaagaaaagctcagaacatcagcccaagacgtacaggtccttcaaaaccgcaaggaactggccaagaaaaagctcgacatctctgaccagcacgattctctgagaaaacggatcagaaatatccgaggccaaatggcctgggctcaagttgaagagcaagaaagagtcagtcccaccctactccccgctttgatgattgactgacaagacagatggaaatttcactcacccaacaaatcgccgaggcggatcagaaaattgcggagaccgagtctcgccttactaggtttgatgctgcctttgatgaagtcaccgcggaggaaacagctgccggtgaacatgcctggcgagctgccgtggcagtgaatgaggcccaagaggaaagagacaaaatcaaagagaaattggacagtgagatggccggccggcatgaccttcaggtacgtccttcgagtcaccttgaaataccttctctgactgttttttataggcagagcaacgccagattagggaatatctcaaagcggccgagttgagaatccaagaaacccagcaaaaagtcgatgatgagaatcaacggctcgctgatgtgagcgatggtggctacactcgaaaacaagaggagtgtgaacaagccgccaatgacgcttctgccgccaagaaggaatacgaagagcaccgccaaggtgccgctcgcctacgggaagacattgaaacagccaagcgagatttcaccgaagcgaaaggtccgcttgaacagaaaaaacgcgagattagtcaagcggagaaccaacttcggaacctcaccaaagaaggtggatcgagacaatcgggcttcaatttcaaaatgccggcactcctcaaagccattcaacaggaacaatcatgggaatcgcgccctgtcggcccaattggtcaccatgtcactctgctagaaccgaagtggtcatctattttggaaagagtgtttggtggcacgcttgccagtttcatcgtttcgtccaagaatgacatgaaacttctcttcgacatcatgcggcgtgtccagtggtaagttttaccaggggtcctatattgaaactgaagctgatctgacctgacctgatagcaattgtccaatcttcattggctctggtgggcgtttggacacctcagcacatgaaccagactcccaatacaagactgtgttacgaacacttcaggtagccaccctctcccgttccacgattcatggaacgtgctgacctttcagatcgacaatgaattagtgaggcgacaactgatcatcaaccatggggttgaacaaatgctgttgatcgaagacgtaaaggaagcctccgcagtactattcgacggtgcgcgaccaagaaacgttaagcgctgttactccattgacgcaaaagatcgacgtcgaggaatctatctctcatacagccgagccggagaaccgagtcaggctcctgttatggggtggaccgatggtccgcgcatgaaatccgacgtggccttgcaaatcaagtaagtaagcctccttccccgaaacctgtaacagtggctgatggctctagcgcacaacgcgacatcattgccgacctccaacgccaacagaacgacatcgaacagtcattggtaactgcccggtcacgcatcgaagcctgcaaacaggcattggtccgacacggaagaattgagaaagatttgcaaattcaaatgcaacgaatggaagatcatgccgaggcacttagagacgccttggataaagagaacgccgaggatggacgcattgatgcccttttagcagcattgaaggaagccgaagatgaaaagctgctcaatgagggatcatacaaggatagtgaggcagccatgaaaaccacattgcagactctcaaagaaatccggcgagaactggccgccaaagattctgaacttggaaccctccgagaaagactacaagttgctgaaagcgagcaaaatcttgtcaaaacgaaaaaaacggaaactctcgacgagaagaacgaagctgttggacttattaaccaagataaacagaccaaggctgaaatcgaggcgagaaaagaagcgataaaagcacgggttattgaatacaacgaaaaggccaacttagtttcttctcgagttcctgtggacgaaggagaaacacccggtagcctcgacaaaaagcttgataaattaagccgtgatctggatcgttacaatttggagtatgtctcttgcagcttagcgttagccataaaactgacaatccataggttgggaagttctcgagaggaaattgctgctgaggcaacaaagactgcagcaacttatgatcgagccttgcagcaacttgatcaattctcggccttgagtcgggtaattacccccttgttttgttggtttctttggtctaatctaatattcgttcaggccctgaaagataccctccagaaccgtaagaagagatgggaaatcttcagggcgcacatctcgtctcgagccaaagcccaattcacctatctcttgagtgagagaagtttccgttggcgggctcctgccnnnnnnnnnnnnnnnnnnnnnnnnnnnnnnnnnnnnnnnnnnnnnnnnnnnnnnnnnnnnnnnnnnnnnnnnnnnnnnnnnnnnnnnnnnnnnnnnnnnnnnnnnnnnnnnnnnnnnncggcttctggccgaccatgccaacaaacttctggatctacacgtaagcctgttcaccagaaccccagaatagaccgatcaatgctgactactgtctaggttgaacctgatatcaccaaagatgatagcaccgggagagatgcaaagacactatctggtggagaaaaatctttctcacaagtctgtctgttgttgtctctctgggaagccatgggatctccaatacgttgtcttgatgaattgtaagttttgttcatggtatggtttgggtcttcatgctgacttcgaaagtgatgtgtacatggatcatattaaccgaaagatggcgattgacatgcttgtaagtgtcacttctctttcctagggctctttactgactgacgaatgttctagatggttgccgctagacgatctatcggacgacagttcattctgatcacgcctggtagcaagaccgatatcaccatctctgcggatgtcagagtgaaggagttggcagagccagagcgtggccagacgacactaaccttccggcgctgaactcgtcaattctcggttaatcttatttgcagcgaaatacccttaggaaatgccatgttcttgccatattttaaattagttccacaccttgtgtcatgaataaaatcgtagttgtagtcgagtgacacgtgaccataaccagaggaacgtttagcttcactctttacctcaaacctcttcgctccccgccatcataatctcaacatctcctaccttcgtaccttttttcccctatttgtcaacagagctggtttataccattctttattctatctgtgaactcccccagctttggcatcaaagatctttcttggttccacacagaagcttcatatcattgaatacctgatctcccatttcctccaacccgaccttattggtttcgacgaatatctctcttctcccctcccgtttccgttacctcgaacctctgccaaaacattcctattctaacttccgcgcaaccatttcacacaccttgatcgcaaacaaaatcggtcacctcacttgctccccacctccttagcaccttatcgtcacaatggccgacgcgcttgctgcacaactcagcaatactaagctgtaggtcgatctgtttccttagtccctaaaacaaatctgactagaccagggaagcaacttcagagcaaaaactgcaggacacattgaatctcccccccaaagatactcgcccacaaactgaggtgaatatattgtgactgccagtcaatgctaaatactgactttgactaggatgttactgccactaaaggcctcgaattcgaggacttctacatcaaacgtgaactcatgatgggcatttttgaggctggatttgaaaagccctcccctatccaagaagagacaataccagttgccctcacaggcagagatatcttggcccgagctaaaaacggcactggaaagactgccgcctttgttattccaactctcgagcgcataaaccccaaaagtacaaagacccaggccttgattctggttcccacacgagagctcgcactccagacatcacaggtctgcaagaccctaggcaaacaccttggtatcaatgttatggtcaccaccggtggaactggcttgatggacgacattatccggttgaatgaccctgttcacattcttgtgggaacccccggacgagtattggatttggctagcaaaggtgtcgccgacttgagcgaatgcccgacatttgtgatggatgaagcagacaagttgctgtctcctgaatttactcctgtcattgagcaacttatgtccttccatcccaaggatcgccaggtcatgctcttcagtgccactttccctttgattgtcaagtcatttaaggacaagcacatgcgtaacccttacgagatcaaccttatggacgaacttaccctgcgtggtatcacccagtactatgctttcgttgaggagaagcaaaaggttcattgcttaaacactcttttctccaagcttcagatcaaccagtcaatcattttctgcaactcaaccaaccgagttgagcttctagccaaaaaaatcaccgaactcggctattcgtgcttttactctcatgctcggatgcttcagcagcaccgtaaccgagtcttccatgacttccgcaatggcgtatgccgcaacttggtttgctctgacctgttgactcgcggtatcgatattcaagcggtcaatgttgtgatcaactttgatttcccgaagaacgcggagacttatcttcaccgtatcggccgttcgggccgtttcggacacttgggtctcgccattaacctcatcaactgggaggatcggttcaatctgtacaagattgagcaagaactaggcactgaaatccagcccatcccgcagaatattgacaagaagctttatgtctatgattctcctgagaacatccctcgacccatctccaaccctccacctcaaactggagctggatccgtgaacatgaacggagaccgtcaacctcgtcggaacaacaacaatgggcaaccacagagtcaacaacagggtcaacagcatggtcaacagcatggtcaatactacaataatcgaggacgcggttcttatcgtggtcgtggacagggccaacgtcgtggggcacaaaatgacgccaaccggattacctttggtcaaccaaatccgggtcaaccccaggcgcctctttcttaggcccggacacgcctgcacaacacttttcatatcgctgcgctttggtttcctcgattctcttattctattccgctctatcttcgagatcttgtcgggctatcccggcattgattttccggtcataatgatacgggagtgcaatgtatcatatgtctttttccattcaggtcccttgtccaatgagttggatccttgaggaagatgcattttcggcgcctacgctcttcgttttccgaggctgtattctgtgtttcaaggacttgaaggatttgcaaggatttgcaagggcgttctacaggacaagcgtctcatgtggcttttttcccccatgggctcctttttattttcccgacgcaacgagtgatgatctcaccctttaccaaccttttgttggcagcctggagtcctcccaccactctaccatgcttaacctcattcctgcctacgctcactttgtgtgattgccgttgtcaatagacacggtgcacacaactctcccactctcccactctaaaaaaaacaccaaaaaaagaaggaaaaaaatggaggagcactagttgtctaacggatctatttatatcagctagtgaattgacaatatccctccaatttgttccactgtagtaagttgtaggacctcgatgcagtcttcgtgtgtatatattattcccatatgaatgcgttttgtaaaggaactggtctcctacttccctggctgattccactgattccatagatccatcgactgcgggaatggcacgtgccgagggccgtatattgctggatctccgagttcggcgaccgcaattcctccaaaccaccaaaaagaaaatggcgacggtgaataaggatcacaagggaaaggtttgttctccagccaaataatacagtccacttgaagctcaccaataattagcccagtgcccttcgctccatccttgcggggtccaccgccggagccgtggagatcggtaaagagctcaatgacccctaccaggccgctagctaaccgtatactgcagcgatcacatacccggccgaatgtatgaccctttgaatgtcttccaacgatttttgctaatgctacgaagttgcaaagacccggacgcaactcaatcgccagcttacccacggccaaaagctaccatggccaccgtttggaagccagtggtatgcaggatgtacaacactgattatcggaaactcgctcaaggccggaattcgtgcgtctaccttccgcgattgtctggggcagcgctgatgtatactaggattcgtcgctttcgatgccataaaatcggttctccaggatgagaacggcaaaatctcaggaccaaggacggttgttgctggatttggtgctggattcaccgagtctcttttcgccgtcaccccctttgaaagcatcaagactcaattgtacgttttctgtcctatttctggctagctctactgaccgaattataggatcgacgaccgaaagtctgccaaacctcggatgcgtggttttttgcatggtagcaagctcattttccaagaaagaggtgtcaagggtttcttccaaggctttgtgcccaccacagcaagacaggccgccaactcagcaacccgattcacggcctacacaacattgaagcagcttgcagagggctatacggcgccaggtgaaaagctgggcactgcagccacatttggaattggtggaattgcagggctcatcacagtgtaggacttgatctctaaagacgatgggcaaaaagacacatccaagctaacatgactcagttatgtgacccaaccattggatacggtcaagacaaggttagcatccccacgcgcgctaatggtatatataaggtcctaactatattagaatgcaatcaatcgaggccagcaagcattacaagaacagcattgtttgcgcaacaagaatcgtcaaggatgaaggtgtcctcactttgtggtctggcgccatgccacggcttgcgagattgatcatgagtggaggaattgtgttcactatgttcgtgaccaacccaaatcgtactatgaatgttgctaaccgctgggcaggtatgagaagactatggaagggctggacatcttggatccggagcgaaagtatttgtagaatatcaatacatggtatctctgtacatcaaaagaacaactctgctatttactctttgcgtttgccatgtcctcggcaaccatggcctcaacttccctatcggctatccaagcccgcacactgtccatcacggtatccaaaccatcaccgccatcaagaataccatccagattgtggacggtgatacctgtacgatggtcggtgcagcgactttggccaaaattgtaagttcgaatcttatcacctcgacccattttggccacaccacccaatatacctcgtctgagctgcataagctcttgctcacgagcttcttgccgggcttcggccagctttgcccgtagcatctgccacgccttcctccgattggcctgctgggatcgttcatcttgcatggagacaaccgtatgagtagggatatgagtcagtcgaatggcggactcggttttgttgacgtgttgcccaccagcacctccagccctcatcttctcaacccggacctcttgcgggtcaatatagtaatcgctgctggggtcttcaaagttcatggcactatccatctcactgccgtcctctgggaaactcggcaagaccattacgctgacggcgctagtatgggtgcgacccttggtctcggttgcggggactctctgcaccctatgtacccccgattcagtccgtaatatatcgtatgcaccattggcttcaatttcaattaccgcttcaatgagacggtcgtcggacgcgccgacctctgtgtcctgcttcaatattgttgggcggaggccccttctggagcaaaaggcaacgtacatccgtaacatctcaaaagcaaacaagcctgcttcatctccacctgcaccgggtcggatttcgagcaaacaaggaaggtctgcaaatggatgtcgcggaatgagagccttcttcagtcggtctgatatcgtaggcaaggtatcgcgactgctctcaaggtcttctgttgccaaagaccgtagttcggagtcagtgtcggggtcgtttaatagggatttgagctcgacgatagactaacggagttagtagggctccaacaaagcttcccaaggcgcttacatcgttggcatggacccattctttcaagatatttgcaaccggtgccagttctccggctcgtttggccgttttcgcatcaaaggattctcccaatcgctccgcaagctttgtatgttcatctgcaagtagacgtgctctgcttaaaagagctggagacaaggcataatcggatgctacgtcgcaatttagcattgatcagaaaataaccggaccggtcttaccggtatgtacacctcgcaagggagacagtttcagaccaagcctaggccgcaagatatttcgacatattgacttgacgagcatacttcgagtcagagtgtgaagaccaagatccggagcgaaagcgattggagataaattccatgtcacatgacggtaacggatcaatacgaggcgtaaaggccacggagtatgctcatccaacttccagtttcttgttcattgttcattgcgctttgtacttttctcttttggcctaacttctttggattatgcccctcttcttgtagtcctagggagactgattctacaccaaacccctcatttacatatccattactgcattactgcgtcgcatacccccgagatgctcgtttcattggaattattcacggcctttctggcttgtgtctcggctggatatgcccttcaaatatcgccagatacgcctctctccgaattgatctcttccgccaaagcccacctcgcgcagggctcaccccgagatgccgtggtatacttcgatgccgccgtctcgcgcgatccaaccaactatatcaccatcttccagcgcggtgcggcttatctatccattggcaaaaactcacaagcctcaagtgactttgatcgagttctagaactcaagccagactttgagggcgcccttctacagcgatcccgcttaaacgcacgctccgcgcattggcaagaggccttgcaagatctcgagcgggccgggaagaagtcgacggatgattacaaggaactagaagccgcacgggatgcggccacattggccctcaatgctgaaaagcaaggcgcctgggacacgtgtgtctcggaggcaaatgtggccatcctaaaggcaaatacagcactgcctctgcggcaggctcgagcccattgtcattttgaaaaaggcgagacggaggaagggctcagcgatttggcacatgttctgcaaatgtccccgaacttggtcgaaactcacctacaaatgtcgtccatgctgttctactctctaggagacagtgaccgtggccttgctcaaatccgtaaatgtctctataccgatcccgactcaaaatcgtgcaaccggctctatcgacgtgaacgaaagcttgccaaacagctagaaaaattgcatactgccctagactcacgcaagttcagcaatgcagcaaatctcatggtcggcgatagtgataccagtggactgatcgcagaagtcaaggccgatattgaagaagcaagacaagttaaccatattcatcgcctggcacccaataatctttacacattcctagtcgagaagacctgcgaggcttaccgtgaagtgagtgcccactacacatggcttggtttctgtcactaacatagccagatgcgtatgatcaaaaaggccggtccttactgcaccgaagctctccagcttgttcctcactcacttgccgggctcctctataaagcccagattgctttggacgaggatcgattcgaggacgccatacgtacgctcgaatcggccaaggaacaccaccccggttcccaagaggcgcaatctctccaacagaaggctcagaccctactcaagcgttccaagcagaaagattactacaaggtccttggtattagccgtgatgcggatgatcggacgatcaagcgcgcgtatcgccagctagtgaagcaacatcaccctgataaggcccactcccagggtgtaagcaaggaagaggcagagaaaaagatggcggctattaatgaagcctacgaggttttatccgaccccgaactccggacacggttcgacaatggcgacgaccccaatgattctgaatcgcaacagcggggcagtccgttccaaggcaaccaattcggtggtcaacagttcttcttccaacagggtggtccacagttccagggaggtttcaaattccctggtggattccgctgatcagattgtcttttgtgaaacataccaggtgttcgtggagtttctcgatgtatttgggaagctatagatcttttgaagcccgcatgagggataggtttaggaaagcacatgaactgatattatttctgttatttggatcgaagtaaatggtttgcaatctcatcctcgtggagcatctgtcaagggcacgtagctcacctggaagaccttctccctgtgaatggatccgtcttcctttttatccaccacccagatatattgacccccattgggatcaatagcaccctcgctgtcttccgattccaccgggatgaatagtctcccgggagcacgtagctggtccaccagagttggatgaagcttgtcggctgcggcgccaacgtggatggcgtcgtagggtgcaccttctttccatccaagacgtccgtcgcccgtgataaacttcacggtgccgttggtctggaacgcactacctttcttggacttgttcatgttggaacgagccatgtctgtcagctcggggatatggtcaataccaatcacctgtccctgggcgttgccggatgagctggtcaccaaattggcaatgacatgggtcaggtatcctgagccagatccaacatctaacacccgggcacctggtttgagataatcaatcagatactcacatgcatggccatgcatgtgcggtgctgatatggtggccccgtatccaatgggttgaggcgagtccgaatacggccgtgatggagcataatgggctcgatcaaccttggtcatgttagaggtgacaatgaatcagatatatatcaatatgctcacgcctatcatggcatcttttacacgctcattctggatcagtccggccttgaataggttctcgatcaactcggtgttggtagatccagaacaataccacgccatggtcatagcctgtgttgctttgtggatgaattttggtttgtatggactaatcatggactgaatgggtgttggatggtgaaagagagaagagttactgtccaggtatgtttggccaattacatagtatgtacatgtgtgtgactatatataaatgacgccatgatatctacattttcacacgtgatacctgaaatagtcacagttgcagtaaaaactatcccactaattcatacagtctataatgttatatctagtcaaactaaatttataatcctaatataccagaagggaatgcgtgcaatcacacgtagaatggctacagagtaccaagtcacgtgaaagtgatatcaaaacatcttacaggtccgtggacatcgccgactcatcgcgccgactacgcgcgttgataaaatcgccgtgggaacaattacacttacagggcatcatggacctctataggactattcacatacccctcatctgatattctcccctggcttcagccatcagtattgaccttcaaaatggcggaccgaggccctggcacagcagcgactgtggatctgctgattctcgactacatggtctgcctatgtatcagcggactcctagaaggtatttcacaagcaagagcatccgaggacattgaatactttgcgctttttgttgaacgtaagcaccagaactgccagcaatggaccatgcatactgaatatggctctagagctccaccggcggcttgccctccatcacctcgaaagccccctgccctgggacctagatttcaaattgcgcatcttctacatgtccaatctatttctccactggtacccccccaaagactacgacatgggtccctttgttcctctgtctgatatcgcagtccatttcttggacctatgcctcgatgcagtcgcccacgtatcccggggacgctggttcgacctcggtgctcacttcatggtccatgcgatgttagaagaacatgcgcgtttccccgaccagctagacgcactctgcaactggagaaccaacgacagtgaactcgatatatggtgggaggtcagccgtaactggttccttgggcacatgccacccccatttggtacggcgggtccaatgagccaagcagagattaatgaggggtttcccctccaagcactgcagcatcgttatgtcgagttcttcgaggacctcatggatgtactggatgtgccccttcttcttcagctggagcaaggtcagctggaaggtttgactcgggaggagacccgacaggttcgagagtattgtggaatttaatcttcctctacacaacgatacgagaaaatgcctttctatgtgcttccatgtgtaatgacgccaagtcagacacgtgaaggatcatgagttaatgcgcaacaccacatgtacactaactcgatcatattgatcgttcaatcttgatcaattttaaccaattcagatcgaaagccaatacacacataagacaggaatagtacttagagcccactacaagacccttgacatggcatttataacttggaacaataataatttacaaagggcgcaaggccgctctaggtacgagaacacaaacaacaaaaggcgcgtgacaaacactcatgctacttagccgagcagcatgcgccgggggtcctcaatgtactccttgacctgcgatgggattagtgattgattcgggcgaacgaggaggtagacataccttgacaaggaaagtaacggcctcacgaccatccaggaggcggtgatcgtacgtcagagccatatacatcatctaaaaatatcagtaaaccgaagaatgtgattggggttcctgtacgtacggggcggatctcgacattgccgttcacagcgacaggcttctccttaatggcgtggagacccaagacagctagacaaaattagacctgaacctcaaaaatagtacgagggagctcacctgtttggggagtgttgatgattggtgtgcccatcagcgagccgaagacaccaccctgggatgagttagccatgttattgtgaaacacacaaagagacgaaacatacgttgctgatggtgaaggtaccaccggccatgtcttcaatggtcaacttattgtcacgagcctaatacaagtcagtaagttggacaccccctctagaaaaacaactgctcaccttctttccgagatcggcaatggccttctcgattccaatcatatccttgccttcactgttacggacaacaggagtcacaagtcccttttcggtggcgactgcaacgctgatgtcaacgtaatcgcggtagacaatggtgtcaccgccgttaggaccctcaatagaagcgttgacagcggggatatccttcatggcaagcacacaagcacgggagaaggcgctcatgaagccaagcttcacaccggtcttcttgagagtatcttccttgtacagtttccggaactccatcagcgaggacatgtcaacctcgttgaaagtggtaagtgaagcggcggtattctgggactgcttcaggcgctcggcaatacgcagacgcatacggttcattttgacctagaccaaaattagcttaagcttaaaccaaagtcaaaggcccattggcggtcaacttacccggcgttcctcgcggttaccaatagaagctggctgttcggcagcttggggcttaggagcttccttgggaggcgcagccttcttaggttcaggcgccttgggcttctcggtctcggtgggggcgggcggggcctccttcttaggctcaggctctttcggctcaggcgccttgggttcgggctccttgggcttctcggcgccctcgtccttctttccgccttcgggagcggcgccaagctcgatcctgacgagatcctggccgacagtaacggtatcttcctcgttcacaaggaactccttgataacaccagaatccggggcattgaccgagacatcaatctgaacagaaaactcacgttagcgacagtactagttgcgagagacggaagcggagttggtatttaccttgtctgtttcaattgtcgcaatctcctcgtcgcgctcgacgaaatcgccaacctctatatcagaataagcaaatgtcaaaatgttcaaccacagctaaagcaccatacgttttgagaactgcttgagggtaccctctgtaatcgactcagccatgttggggaccttgataatggagtcggctaagcattattagcaattgaccaacaagactgcttaagaaaagcatttaccataggtgcgaagctgatggcctcccagaggagcaagattgagcctcgagacattgatgctatagggttgtatgagccaaaattgcgacagacagtaatgagattcgaatacttacccggaggagacctgcaacaagcccgaagctgagcgagccgaagccttccgcgtaagggtagacaatcccttgacattgcggaactggcttgctccccgaggagcggttctggccacagccgagaagcgttggcccgagaggcgcgcaataaagattcgagaagccatgatatgaattaaagcaaactttatacttgaaaaaaaccgaagcggttatgtaggagagaggaagaacttcaactctttgaaaattagagaaagcaggaaagatgaagctcggattaggtcgggtcaaagtaaaccgggcacccttccggcagaggcggaccattattctctacggggacgggcagtgaccatttgagcaaatccacgccgagcgaattaggaagcccagaatagtcaacctgacgacattgaagccctcaaccccaacccattgtctatcaggagccctaacgatctccaaggttgtcatacctgtttatagatctgtgtatcaacgtacacctttcttgtttccctcttcctcttccagttggccggaattggacccgggacaaaacttgagcacaatgtccacctctgctgttaagtgagtaggccggtgtccccctagtggactgttcactgatctactctaggtcgctctaccggcgctccctgaaattgtcttttgactgggccgtccaccggcagctctggcgtggacaagcagtctatatccgatcccttttcgacgccaacaaggacgtccgcgatcctcgccaacaacaagtatgtaaaaccgcaacttatggctggcaagcctaacacatgctctaggttttgttgcgcgagacagagaagctgttggagacctggaagcaccctgacccataccacgcacctactgcgcctggcggcaacaaatgggagcgcaacctgccggccccaatcctgccatgtatgttcatatcccccccccccccccccccccccccccctccacccaaccctcnnnnnnnnnnnnnnnnnnnnnnnnnnnnnnnnnnnnnnnnnnnnnnnnnnnnnnnnnnnnnnnnnnnnnnnnnnnnnnnnnnnnnnnnnnnnnnnnnnnnnnnnnnnnnnnnnnnnnnnnnnnnnnnnnnnnnnnnnnnnnnnnnnnnnnnnnnnnnnnnnnnnnnnnnnnnnnnnnnnnnnnnnnnnnnnnttcataacccccccccccccccaatgcaacattggatttgcactaaccctgaaacaatatagatgcccaacctcccggtccacactaagtaatatcgcaaaacacaatgaggattgggccaattgcaaacatgaaatgatgcaacatgaactatgcgtatcttccttgcaaatgtagagtactcaaatcagaatctaaaataagcaatttcgttcatgtacaatagccaccacgagagcaacaagtctccaaggatcgcgtttatatgtacaatgtatacaggaagtacgaaaggcaatatagtaaactttttcttaacaattgaaatacctggagttttcattgatttgggctcatgcccagagctagtatccgaaagttgaaatccctcaagcgagttaaggtcgtcggtatcatttcatgtccgtagacataatgtacaaccaggaaattgatggaagaaaaaaagaaaacgcagagccataacgtgcccgtcccataaccccattatcgtgtcaaagaaccaatccgcgccggaaaagaaagcaaacaaaacccgcgaaaaaaaaaagaaacccttacagctcctggctgcccttgccggccttgggagtcttcttggggagaaggtctgagattcatgttagcatggtggaaaagaaacgattggtttgagagagaacgtactctggtgaatgttggggagaacaccaccctgggcaatggtgacgtgacccagaagcttgttcagctcctcatcgttgcgaatggcaagctggaggtgacggggaatgatacgggtcttcttgttgtcgcgagcggcgtttccagccagctcgagaatctcagcagcgaggtactcaagaacagcagcgaggtaaacgggagcaccggcaccgacacgctgggcgtagttgcccttgcgaagcagacggtggacacggccaacggggaaggccaaaccagccttggaggaacgactgaagatgttgatgtcagtatgaaacgcatatgtaagaagcgaaatgtaaacaactcacgactgcgcgttcttgctgccgctagccttgccgccggactttccgccagtcattttgatggttggatttgaaaaagggggggttggggaaagaaaagaagttgtttgttgaagatgaaaagcttgggttatggtgtaaagtcgcaagagcagttgggagagcgtgtggaagcgaaggacctttataaggacgcggtgagggtgacgttgggacggcatcaatgggccctccagatcacggcctcgcttagacattgtagccaatgatcaatcagatcagaccttccgctttgggaatgatgtggtaagataaggccattaccataccggacagtcagctgactgtgatcctaccccacctttcccgtctttcccaccttaagacgcgtcaatgtcggtttaatcatacagatcataccaggctcttaccgtattgaaattcgtcctcctttgcaccccctccaggatcaactgacctttggaacacgagtataaagacgctgtctcccctcgtcaccgcgtctctctaacttacccttccacattccatctctgtttcccacccacacgcttcatccatctttacttcaactcttccaactctttttttcccaaccaaccttttttcaaatccacattcaaaatgccccctaaggccgctgagaagaagccctccaccggtggcaaggcccccgttggcggcaaggcccctgctgagaagaaggaggctggcaagaagactgccaccactgccactggcgagaagaagaagcgcggcaagacccgcaaggagacctactcttcctacatctacaagggtgagttgattcctgaacgcgacatcagtcttcaaagaaaaaccacgcgtccatactgactccattttcagtcctcaagcaggtccaccctgacactggtatctctactcgtgccatgtctatcttgaactccttcgtcaacggtatgttttcctcttcgcgaaatgcacgcgtttacgcgttcttccacgtcacgttttctaacttcattttccagacattttcgagcgtgtcgctaccgaggcctccaagctggctgcttacaacaagaagtccactatctcgtcccgggagatccagacctctgtccgcctcatcctccccggtgagctggccaagcacgccgtctctgagggcaccaaggctgtgaccaagtactcttcttccgccaaataagcggtttctttacgttttctttccagcttgcttttgtttttactacctcttgatctgttatgggctctgaggtggtcggttatgggtgttttgcgggtttctaatgcgtcatgggatggcttgaattttcttttccccgatgggtgatttttttttgaatggttaccactcgatacgtgaatgcggtgtaacataactcgggtctggggcaggcatggattggcctcccctactagaacgcgaaattccaaatgcttaattgcattgcatcatcattctatttctctttcctggtaaatgttccaagccaactaaaaatgaacatgggtgcctttcatctcatggtttgtctgttatcttactccatctcatctgaatcatccagcgcctcaacttcatccagagcctctgcccgaccatagccatgatctggctgatgctgactggggaagatgtgcacaataggctgtccaggcgtggattggattcgtttcttccagtcggcccaatcgtcttcgtccttgataagaaatccaatcaacatgctggggtccatgtccttgatatggattcgccgtagtcggccggtgtaatagctatccaattcctctttggtgtagagcccatctggtcggtatgatgttgcaggtcgggtggtatgcgggtcaaggaaaaagaggtggcagtcttgagcagccacgaaataatgcgatgccgatgggcgtccgctgtcttggtcagcacacgctttatatcagaacagacgcatggacctaccctgcaatgccaacggattggggatatgtcagtgcggctcggagtccatcccaatacgctggggtgacattatcgatccccagcctagttccaatcaagatgagcgtgggttgaattcggcctgatctatcgtgggccacgtgtgcaaatttgtcttcatagacgtccgatgtgtcattggttacatagaccctgagttggggggcctcgctttgatttgaaagtagcctatcaccatcagcatcactctatagctcgagttttggcaacactcactggatacatttagcagttgccgatggcccaaaccattcgcctgggtatttcccgcatgattctgcaccgcgatcgacaaattgatgtatagagaatggagcatcgggatgatcagcgaacatcgatattagctttgactcctcctccactttctcccctcgacgccagtctagtatatctggttagctcttgttgtggtgtattttgggggcgagggtatgatcggaaggatctctcacctcgtcctagtagtaaaactgaaaatgtgtttgccaaaaggctttgtccagatctgatcatgcagccccaccctgtatctgatgtaaagccttgggggtccatcagctgacttctcagacgtactcccagtgtcatcgaggatgttgcttctggtgtctttgttcgtgggattggtgtaaagtttgatcgatatgtgatccatattctcgatccaaaatcagagagaaaggccttgggccattctgtgtcattcaatatgctagcatcgggctcttctggggagctgtgtgggttgttggctatatgggatattagaaggttggtcttggagttatatcttcacttgagcaaaactcactgtcctggtcactgggtggttgcgggggggcatactctctgcctaggcaccatattgaagctgcaggtatgtcatttctgggttctgggtcccagaagtattgtactatgcgtttgcacttttccatgtccacggtcatggttggtgctgtttttctgccgtggacttgttgtagttgagggtaggtgagtcaatgttggaggtcagtcagtagtagattatatatatctcctggaagataacccagtgatttgaaaaccaagtgagtcaacccaggtcaccataagaggaaccgaggaaaaccccaaaccaaaaataatagagatacgaatgacaaccagtgaaatatctagacaaaagaagttggatcttccctttctcaggacatacgcaggtgagggggaagtcttccgtcacgagccaagacgtcaccgaccaactcctatgtatgcaatgagtgtgtaagtctgcactctatacatttacatttacacttgaaattgtcatttgaatattaataaaaacaattaaaaaacaagatcattcttatagaatcccctatattattgttaccctttgtagaatatctgtcaccgcccggacccaaaggcaaaagaatgaattcccccgtctgcttatttttttcccatcaacagttcagattcaccatcacctatggcccgccatgggaaattcaaggcccgtagcaggcgggcaccaccgtgtagaggtaaccagtgtgctcctgttcttctgatgaatactaacttattcaagacccaacgccacaccagtttaccatgcaggaagaagctcagaacaccgaaacccatcagcgttcatggtcagatagcaaccttcgtcacaaagctgttcacttcgtgagcgcaggaagcttgaagccgacattggaacaagcagacgaggaccagacaaaattggacacggaccgtgaagaaccgaacaccgacaacacaccggacaaaaagaccgacattgaggtctcgttcttcttcgactcaaagggacaaggagtttttcatacagagcacccagacccagtattgcagtccaaattatcggacatagacgactcgagtgaagatgaggttgtgttcaccggccgcaggaggaatacaaaacccgttctcatcgaaacgcatcagaacgagattgaagaaatggtgcagacgaatactgttgcatttatgcagaaaccacagacaccaacattggactatacgtccggggacccctcgcccgccgctacacctacagacagccttgaatccaatacagagagaccagactggccacagaaagaagagaccgacccactagccgactatattgccaacatcgacaacgactaccacgaggtagtgacctacagtgcaaatcttgaactagaaggtggcattgacgtcgaaaaagccgcaactcaactagacctgtcggcttcaagccatacagggtccaaaattggatcaccaagatcactagctcaaatgcaaattgacatcgaacatgattcaatttcaacatcaagcgaagacgacgaggacgatatggtcatctctggatcagacgaagacacacttgaagattttgtgttgctggaggacctggcgaatggatattctgggtccaccaagaagggttcccgttatggaaaaccctcatttcaatcggcgtcggcactggcggatgctcttgagtccgactcgtatttcgggtttgacgtaatggactttgaccggccaagtctacggaaaaaaaacaagggcaagcaagccatccccggctcggtactatcggatagtgaattcgagctacatgaagtctggcagaacgaccggaccaaaaagaagatacggaagatggagcgggcagaactccgagcgcaaggactactgggcagaaaagctgggaacccagacctcaaggtcaagtatcccaaggaaatgaacatggaggaattcatgaccgagattcgctcattcctcatgtctgccaaaaataggttcgttttatatctgctcattctcattcacctagctaatccagtatagcctgtccttgccgcccatgaccaagcaacgcagaaagctgatacatgaactggccaatgcgctgaacctgaaatcacagtcacgcggcaatggactctctcgcttcccggtccttaataagacggcgcgcaccccgcgatacacaccaaagactatatctaacgttgacgagctcttatccgggaggaagttcaaccgtcggttgttcaaatcatggggcacggaagtgccaaaattcccccaacccaagcgtggaaagtccggtgctgcttcatatatggatggcgatgtggttggtgcctctgctccagaaatcggagctgaaaaccgagggcgggctatgttggagaagatgggatggagtacaggtactgctctgggtgccgccgacaacaagggaattctgcagcctgtcgcgcaggtcgtgaagaactcacgggctgggttaggttagatctttggggttgtgtgtggtaagaagaggaggatttccagccggcatatgcggcctcgttcaactagagaaaatataaatgtaagactcgacggcaccttttcatcttttcattatttaaagaagaaaaaaagaagaagaagaagaagaagaacgggaaatgagcctcacctacgtgtttgttcctagtgttttctccccttcttagcaagagaccctttcaaaggttgtgcgtgatcgagatctctaatatgatcgaataatttagacttggatgtaaacggagcctggcaatttgcacaaataaacccagtgggttgatccgcttgtcttgcggcctttttcgcccgtttctgcttggccttgcccattttgagagttggtgactgctcggtgaggtccgaagagaacggacgaccagggatgtcagaggagtctccggcacccgtggacaaagaatccatgtcggtgcggagtctagtctcgacatattccctggaggcataatcgtcatcgtgcgaagacgttggggagcttagctcggaaagaggaattgtttcctctagaccatgtgaaatttctcgatcctcagcatcaatgtcatggctctccaaggaggcatctgataccacatcgacctccgaggcagcagaaaccttatattccccgacatcaacgtcgtcaagaggtttagttgcaactgcattggtacccgagtcatcagcagactccaaatccaattcatcattctgcattcgcatctcccagcatagctgtttgactgccttcaaatgcttcttgctacgttcgtgcgcctcgaattgcttctgacttttgaaatatttgtgacatgccacacattcaaaactctcgacttcgctctcttcgctcctctcctggtcgtcatctgccaccggttgctctgattgggcccactcggggaggacatgatcccgcatcctggcttgattcacagctcgtgaccttgcagcttgtgcagccacagactggcggagggtttcttggcgttgagcttcactttgggcgttgactttataccgcgggtcacgtttcttgacaaaggccacgagagacctgacagcatcgttaaattctcggatgccttcctcccgaagacgtctgttctccttttccatcattcgtcgtacccgacgatcaggcgcttcagaatagcgatgagcatctttccatgcgaatgatttttgggtggaaaatccggtccatgcagcatagaagggtcgcacaacggtctcaaaatcatcgtcaccagatccaaatgatggatattcaataggatcttgattctcccactgacaggccaatctttcttccaccacgagctgttcgaattgctctcgtaaaccaccaaagaatccggttggggagtcggagaattccatttgaggactgaacttcgaaaaaagtctgaggacatcttcagctgttgtaatccgaacattgtacgagtgttgatcgtcggtgtttccgttggtccctaaaaatgcatcgctatgggagtcgtaccatgcccgttcctggggatctgctagtacttcgtatgcagattggatttcggcgaacagcttagtagcctcgtcaacattcccgtaatttcgatctgggtgcaatataagagctttttttcgatatgcctttttgatcctaagagttcgttttagttatgtccgtaaccacatatccacatatccatatgaacttactcctcatctgttgcaccgcgtataacaccaagtagctcataatagtcggtcttctgctctgtctgttctgaagcgccagagctcgcctggctagtggaatgaaattggcccatggcgttcaaggatgaataccgcaataatcaccggttgtttttaaaggaacttagtaattcattccaagtaccccaagcaaatcattgggagcatagagcgagagtactgtctcaagtgtccataagcagaggaaaggaagaaaaaaaaaacattgcgatggaattcaagggcttggcgccttcgataacgaaagcggggagaaacattttctcaatgacttttgtattttcctgttctcctgttctcctgttcccctacatgatcccctgagtttctgatctacctttttaatttgcttctttaccttcaactaccgaggaatgtaaaccggttgttcttccgttttgattgccctctccgttggtcttctccaatatcgtcaatattcctccagggatggttcggtctttaagccatcttccagacgagatcctgaattcgattctacgttattcttctcctcagtcttgcgccgccgtcgaacaaaccaacagtcgatttaaaaacgtaacgaatgagcctttactatggcgtcaccattgccagtcgcattacaaattctgggatgggcgacatgatatgccccggaaacttgctcgcccagtgaattcaaccgattggaaggccctttttgtcttcaagtatcaggttgaccgatctgtcactcggcttcttgatagtattcttggtagccagatcggccggatcgagaagtttcgccgtgttatcaatatgggatacgatacaaaagatactcttctacgatatagcttgatagattctggagaggattatctggccagaaggtgggctactaattctatgcgagttggcatgtgtttccctcaagttgaccagtgccttgtgccaattacaaaaggtactatgcccacgcgctcttgacttgcctacaccgaaacattgcgataccagagtgggcgaaactcaaacgcggagaacccgtgtcactcgaccgagccttggcttgctttgatctctttatacccgaaagtggaactggggatttggatgaagtaggtgttatttcaagtcaaccccctcgacagatctatgcctaactctgatctagatacgagactctctggatgagatcctcggccgctttgtcgcatctcacccggatctttacctctccactcctcgtgagaaggcactggccgtagcatcctggctaacgctgaataatctcacggggatcgatccagagcgggaatatcattctttagagcataactttttaggactggctctaaagcatctagggcataactctctgccgttggtgtcagctgcgatatactgctttgttgcgcagggcgtgggcctgaacgcccatccctgtggatttccgttccatgtgcatgtgatcattacccctcagccgggctcagatatcaatggcaacgctttgagtggggtggggccagggaagcccctttacttggacccgtttcggggtgctagagagactgatgtctcaaatttgcgcagccagttaacatttttgggcatgtccaacacggaccagatcgcaactctgggtgaagcatccacttctggcgttatcttacgctgtggtaagaacatattgaactcgattcgtgtcgaaccccaaaattcgacctcgcgtgccacctccatagatgttgtgagcgcaaagtacgcagcactatggtctgtgatgctactgtcggacgattcgaggccgatggatctacgccatcagttgccatggctcatggaactgttcgctacggactttccttctgatatatttctagtcgagcagtacatcacacctttgtttcgtggcctgttcgagtatgagcatatactgaagagtcttcatgtgatgagggccatggatgaggtcccaaagaagattcggagacgaaccggtggtaatgcaaatatacaatacaaggtgggccagattttccgccatcgtcgctatcattatgaggctattatcacaggctgggactcggaatgtggcgcggacgaacagtggatgacgagaatgggcattgatcgattagaagctggcaggcatcaaagcttctatcatgtgctgtgtgtggttttgtacttgtatcctcttcttggctaatggctaattatggatatctagtgtggcggatcgaagtgcccggtacgtggctgaggaaaatattggcataattcggcctcgcttcacggaattgcctggaagcttgactgccattgcgggtaagcatttcaaacggtgggatgagcgggagaggatgtttgtgagcaacatgaaggatgaataccccgatgactagttcaaatcaaccccgctttatcgggctgctagctcggatagactcgtaaaaagcctagacttatggtaggctatataacgtattcggtaagcgagctgagcaccctaaccaaaacgcgtccatgaattagcacctagtcaattcaactacctaccgtgccactaaagtctaatacgcccccgatcgtctataaagtcaatagagcagtaggatcttattagctattgaggctttttaaaaataatttgttggagtgtggcagaactaggtaggcacaatgatttgtaatgcactctcgagcggtcaaatacgtagtgtttaaacagataaacagctaggcggtcaagtatcaggtcaaagatgagatcaaagtatatattctagaataaaatagtcaatttgtctaactagcctttttttaatacaatttagggctttattataacagttaaatatttgcagatagcttagtagtttaaagattagatgaattataacttcttctctagataaatcataacttttattatgattagtacttataggactcgtactttcctatttaggattatattattattcgttccttcctatttaaaggaacttatttatatagatagttataccttccttctaggggaagtaaggatagggctttatattgaacgaaagagaggctgtttacaatggtacgaacagtatatatactggaccaaaggggaaaatgagtgtatattataggaggagtgttctcctccaaggttatcctgctatatacttatataatcgcggcaagtggctactgactactaaatataataagaaatgtaaagaatgtacggaagtacgccatttctggtcgacactttatccctaaagggatatattgaacgaaggagaggctatttaacaatggtatatatagtatatatactagactaaagggataaaaataagtgtatattataggagaagcgttctcctctaaggttatcctactaggtgcttatataatcgcggtaagtggctattaactactaaatataataagaaatataaagaatatatagaagtatactatttctagtcgatatactctcctagaagctaccttatagctcctaatataattctactgctaagctatttatctatttataagatcccgaatatctactagtcctaaggattaggtaaacctcttataagtttatatagggagtagcttaataagcctatctactagtatattagctatagctacctactaaattaagatatagctagtattaacttcttagtatagctaatagttatagatatcgatatagtaaagctttatttataattatagttatttataagtaagtaaattaattatctatttattattataattaatagtaaggttagtctagtagttaaggttaactatataaagtaacctttcctactatattactaactttctaactttagagatagtaagtagtttagctttagtagttaatattattattatatattacttactagccttctaattaattactatactaaatagtttatataggaaaccttctaagcttttttaattagtataattactaaaggaagtattactagagaagtaaagtactaattaattatataaagggtagtacttaagagctagatattatatattatatagatattagattaagtaattaactactttataatacttagatcttagattaattaggaatttagctagataattagctacctttactatattaaggtaagtaataactataggataaaaggctaagttaagcttttattagtacttatagatctattcctttattataatccttacttaagatataatagctcccttaatctagtagtaatcttagggaaatactaaactccctaagaatcagccttaactagggaataaaataggaattacttctctaactactagaactaaataaatagaatcctagatttaagaaaatctaattaatcttcctaaagtaactatagaaactacctaatttatctaagaataaatctaggtctttaaagctaaagtagtactttaaaagagacttattactactaaagaacttattaaagtaaatagaagaaagcttaagagttactaaaaaggaaaggagttaaactaacctaagaataaaagtaatttaatattagagagtaaatatagttagaagggtaagattaaaagagatattataatatttaaaaagaaatatagtattaaaaatagagaaaactagctaaataaccttaataccctttttgannnnnnnnnnnnnnnnnnnnnnnnnnnnnnnnnnnnnnnnnnnnnnnnnnnnnnnnnnnnnnnnnnnnnnnnnnnnnnnnnnnnnnnnnnnnnnnnnnnnnnnnnnnnnnnnnnnnnnnnnnnnnnnnnnnnnnnnnnnnnnnnnnnnnnnnnnnnnnnnnnnnnnnnnnnnnnnnnnnnnnnnnnnnnnnnnnnnnnnnnnnnnnnnnnnnnnnnnnnnnnnnnnnnnnnnnnnnnnnnnnnnnnnnnnnnnnnnnnnnnnnnnnnnnnnnnnnnnnnnnnnnnnnnnnnnnnnnnnnnnnnnnnnnnnnnnnnnnnnnnnnnnnnnnnnnnnnnnnnnnnnnnnnnnnnnnnnnnnnnnnnnnnnnnnnnnnnnnnnnnnnnnnnnnnnnnnnnnnnnnnnnnnnnnnnnnnnnnnnnnnnnnnnnnnnnnnnnnnnnnnnnnnnnnnnnnnnnnnnnnnnnnnnnnnnnnnnnnnnnnnnnnnnnnnnnnnnnnnnnnnnnnnnnnnnnnnnnnnnnnnnnnnnnnnnnnnnnnnnnnnnnnnnnnnnnnnnnnnnnnnnnnnnnnnnnnnnnnnnnnnnnnnnnnnnnnnnnnnnnnnnnnnnnnnnnnnnnnnnnnnnnnnnnnnnnnnnnnnnnnnnnnnnnnnnnnnnnnnnnnnnnnnnnnnnnnnnnnnnnnnnnnnnnnnnnnnnnnnnnnnnnnnnnnnnnnnnnnnnnnnnnnnnnnnnnnnnnnnnnnnnnnnnnnnnnnnnnnnnnnnnnnnnnnnnnnnnnnnnnnnnnnnnnnnnnnnnnnnnnnnnnnnnnnnnnnnnnnnnnnnnnnnnnnnnnnnnnnnnnnnnnnnnnnnnnnnnnnnnnnnnnnnnnnnnnnnnnnnnnnnnnnnnnnnnnnnnnnnnnnnnnnnnnnnnnnnnnnnnnnnnnnnnnnnnnnnnnnnnnnnnnnnnnnnnnnnnnnnnnnnnnnnnnnnnnnnnnnnnnnnnnnnnnnnnnnnnnnnnnnnnnnnnnnnnnnnnnnnnnnnnnnnnnnnnnnnnnnnnnnnnnnnnnnnnnnnnnnnnnnnnnnnnnnnnnnnnnnnnnnnnnnnnnnnnnnnnnnnnnnnnnnnnnnnnnnnnnnnnnnnnnnnnnnnnnnnnnnnnnnnnnnnnnnnnnnnnnnnnnnnnnnnnnnnnnnnnnnnnnnnnnnnnnnnnnnnnnnnnnnnnnnnnnnnnnnnnnnnnnnnnnnnnnnnnnnnnnnnnnnnnnnnnnnnnnnnnnnnnnnnnnnnnnnnnnnnnnnnnnnnnnnnnnnnnnnnnnnnnnnnnnnnnnnnnnnnnnnnnnnnnnnnnnnnnnnnnnnnnnnnnnnnnnnnnnnnnnnnnnnnnnnnnnnnnnnnnnnnnnnnnnnnnnnnnnnnnnnnnnnnnnnnnnnnnnnnnnnnnnnnnnnnnnnnnnnnnnnnnnnnnnnnnnnnnnnnnnnnnnnnnnnnnnnnnnnnnnnnnnnnnnnnnnnnnnnnnnnnnnnnnnnnnnnnnnnnnnnnnnnnnnnnnnnnnnnnnnnnnnnnnnnnnnnnnnnnnnnnnnnnnnnnnnnnnnnnnnnnnnnnnnnnnnnnnnnnnnnnnnnnnnnnnnnnnnnnnnnnnnnnnnnnnnnnnnnnnnnnnnnnnnnnnnnnnnnnnnnnnnnnnnnnnnnnnnnnnnnnnnnnnnnnnnnnnnnnnnnnnnnnnnnnnnnnnnnnnnnnnnnnnnnnnnnnnnnnnnnnnnnnnnnnnnnnnnnnnnnnnnnnnnnnnnnnnnnnnnnnnnnnnnnnnnnnnnnnnnnnnnnnnnnnnnnnnnnnnnnnnnnnnnnnnnnnnnnnnnnnnnnnnnnnnnnnnnnnnnnnnnnnnnnnnnnnnnnnnnnnnnnnnnnnnnnnnnnnnnnnnnnnnnnnnnnnnnnnnnnnnnnnnnnnnnnnnnnnnnnnnnnnnnnnnnnnnnnnnnnnnnnnnnnnnnnnnnnnnnnnnnnnnnnnnnnnnnnnnnnnnnnnnnnnnnnnnnnnnnnnnnnnnnnnnnnnnnnnnnnnnnnnnnnnnnnnnnnnnnnnnnnnnnnnnnnnnnnnnnnnnnnnnnnnnnnnnnnnnnnnnnnnnnnnnnnnnnnnnnnnnnnnnnnnnnnnnnnnnnnnnnnnnnnnnnnnnnnnnnnnnnnnnnnnnnnnnnnnnnnnnnnnnnnnnnnnnnnnnnnnnnnnnnnnnnnnnnnnnnnnnnnnnnnnnnnnnnnnnnnnnnnnnnnnnnnnnnnnnnnnnnnnnnnnnnnnnnnnnnnnnnnnnnnnnnnnnnnnnnnnnnnnnnnnnnnnnnnnnnnnnnnnnnnnnnnnnnnnnnnnnnnnnnnnnnnnnnnnnnnnnnnnnnnnnnnnnnnnnnnnnnnnnnnnnnnnnnnnnnnnnnnnnnnnnnnnnnnnnnnnnnnnnnnnnnnnnnnnnnnnnnnnnnnnnnnnnnnnnnnnnnnnnnnnnnnnnnnnnnnnnnnnnnnnnnnnnnnnnnnnnnnnnnnnnnnnnnnnnnnnnnnnnnnnnnnnnnnnnnnnnnnnnnnnnnnnnnnnnnnnnnnnnnnnnnnnnnnnnnnnnnnnnnnnnnnnnnnnnnnnnnnnnnnnnnnnnnnnnnnnnnnnnnnnnnnnnnnnnnnnnnnnnnnnnnnnnnnnnnnnnnnnnnnnnnnnnnnnnnnnnnnnnnnnnnnnnnnnnnnnnnnnnnnnnnnnnnnnnnnnnnnnnnnnnnnnnnnnnnnnnnnnnnnnnnnnnnnnnnnnnnnnnnnnnnnnnnnnnnnnnnnnnnnnnnnnnnnnnnnnnnnnnnnnnnnnnnnnnnnnnnnnnnnnnnnnnnnnnnnnnnnnnnnnnnnnnnnnnnnnnnnnnnnnnnnnnnnnnnnnnnnnnnnnnnnnnnnnnnnnnnnnnnnnnnnnnnnnnnnnnnnnnnnnnnnnnnnnnnnnnnnnnnnnnnnnnnnnnnnnnnnnnnnnnnnnnnnnnnnnnnnnnnnnnnnnnnnnnnnnnnnnnnnnnnnnnnnnnnnnnnnnnnnnnnnnnnnnnnnnnnnnnnnnnnnnnnnnnnnnnnnnnnnnnnnnnnnnnnnnnnnnnnnnnnnnnnnnnnnnnnnnnnnnnnnnnnnnnnnnnnnnnnnnnnnnnnnnnnnnnnnnnnnnnnnnnnnnnnnnnnnnnnnnnnnnnnnnnnnnnnnnnnnnnnnnnnnnnnnnnnnnnnnnnnnnnnnnnnnnnnnnnnnnnnnnnnnnnnnnnnnnnnnnnnnnnnnnnnnnnnnnnnnnnnnnnnnnnnnnnnnnnnnnnnnnnnnnnnnnnnnnnnnnnnnnnnnnnnnnnnnnnnnnnnnnnnnnnnnnnnnnnnnnnnnnnnnnnnnnnnnnnnnnnnnnnnnnnnnnnnnnnnnnnnnnnnnnnnnnnnnnnnnnnnnnnnnnnnnnnnnnnnnnnnnnnnnnnnnnnnnnnnnnnnnnnnnnnnnnnnnnnnnnnnnnnnnnnnnnnnnnnnnnnnnnnnnnnnnnnnnnnnnnnnnnnnnnnnnnnnnnnnnnnnnnnnnnnnnnnnnnnnnnnnnnnnnnnnnnnnnnnnnnnnnnnnnnnnnnnnnnnnnnnnnnnnnnnnnnnnnnnnnnnnnnnnnnnnnnnnnnnnnnnnnnnnnnnnnnnnnnnnnnnnnnnnnnnnnnnnnnnnnnnnnnnnnnnnnnnnnnnnnnnnnnnnnnnnnnnnnnnnnnnnnnnnnnnnnnnnnnnnnnnnnnnnnnnnnnnnnnnnnnnnnnnnnnnnnnnnnnnnnnnnnnnnnnnnnnnnnnnnnnnnnnnnnnnnnnnnnnnnnnnnnnnnnnnnnnnnnnnnnnnnnnnnnnnnnnnnnnnnnnnnnnnnnnnnnnnnnnnnnnnnnnnnnnnnnnnnnnnnnnnnnnnnnnnnnnnnnnnnnnnnnnnnnnnnnnnnnnnnnnnnnnnnnnnnnnnnnnnnnnnnnnnnnnnnnnnnnnnnnnnnnnnnnnnnnnnnnnnnnnnnnnnnnnnnnnnnnnnnnnnnnnnnnnnnnnnnnnnnnnnnnnnnnnnnnnnnnnnnnnnnnnnnnnnnnnnnnnnnnnnnnnnnnnnnnnnnnnnnnnnnnnnnnnnnnnnnnnnnnnnnnnnnnnnnnnnnnnnnnnnnnnnnnnnnnnnnnnnnnnnnnnnnnnnnnnnnnnnnnnnnnnnnnnnnnnnnnnnnnnnnnnnnnnnnnnnnnnnnnnnnnnnnnnnnnnnnnnnnnnnnnnnnnnnnnnnnnnnnnnnnnnnnnnnnnnnnnnnnnnnnnnnnnnnnnnnnnnnnnnnnnnnnnnnnnnnnnnnnnnnnnnnnnnnnnnnnnnnnnnnnnnnnnnnnnnnnnnnnnnnnnnnnnnnnnnnnnnnnnnnnnnnnnnnnnnnnnnnnnnnnnnnnnnnnnnnnnnnnnnnnnnnnnnnnnnnnnnnnnnnnnnnnnnnnnnnnnnnnnnnnnnnnnnnnnnnnnnnnnnnnnnnnnnnnnnnnnnnnnnnnnnnnnnnnnnnnnnnnnnnnnnnnnnnnnnnnnnnnnnnnnnnnnnnnnnnnnnnnnnnnnnnnnnnnnnnnnnnnnnnnnnnnnnnnnnnnnnnnnnnnnnnnnnnnnnnnnnnnnnnnnnnnnnnnnnnnnnnnnnnnnnnnnnnnnnnnnnnnnnnnnnnnnnnnnnnnnnnnnnnnnnnnnnnnnnnnnnnnnnnnnnnnnnnnnnnnnnnnnnnnnnnnnnnnnnnnnnttaatagattagactatttagaattttagaatatattagaaagtaggtatactacctcctattcctagataaatatactataatttataatattttccctatctctttcctctaactataagaataaagagaagggaaactaaaataactactattattagaattagtagataataataaataggaggttaaagagtttaaagataactatatttttaaagataaattatattatctagttaaatagtaggactagccttctaaatataactaataggtcctagagaatataataattaatatactgaaacttattataaaatataaaaaggtataaaagatataaaagaaattaacctaagtaatatctatactaggttactattaaattattataactataatatctaattactataaggaaagatagttatatacttcttaagtattacctctatatctagattattaagtaattctactatcttagagtaaatttattagaataaaattatagtatctatctaagtaataagtaattcctctaaatttataagttaggattactctaaggcctatactataaagatatcttagggataaatagtagtataagtatcttagttacctataggatacttaataataaaggctatatagttattataaatagattaaaaagaaatattaataaaactattataaggaagattagatttatcttaatacttatagtaggaatatatatcctacttaaattatagtttttataatatattcttataagggtattaaaagctataattagattataaactatatctataactactttaataaacttagaagggaaaaggaactatacttctttattatccttatctaatatacctatagctactctaagggtccttctaattattaactaaaattactctatctaagaaagaactactagtaactagaaacaatttcccttannnnnnnnnnnnnnnnnnnnnnnnnnnnnnnnnnnnnnnnnnnnnnnnnnnnnnnnnnnnnnnnnnnnnnnnnnnnnnnnnnnnnnnnnnnnnnnnnnnnnnnnnnnnnnnnnnnnnnnnnnnnnnnnnnnnnnnnnnnnnnnnnnnnnnnnnnnnnnnnnnnnnnnnnnnnnnnnnnnnnnnnnnnnnnnnnnnnnnnnnnnnnnnnnnnnnnnnnnnnnnnnnnnnnnnnnnnnnnnnnnnnnnnnnnnnnnnnnnnnnnnnnnnnnnnnnnnnnnnnnnnnnnnnnnnnnnnnnnnnnnnnnnnnnnnnnnnnnnnnnnnnnnnnnnnnnnnnnnnnnnnnnnnnnnnnnnnnnnnnnnnnnnnnnnnnnnnnnnnnnnnnnnnnnnnnnnnnnnnnnnnnnnnnnnnnnnnnnnnnnnnnnnnnnnnnnnnnnnnnnnnnnnnnnnnnnnnnnnnnnnnnnnnnnnnnnnnnnnnnnnnnnnnnnnnnnnnnnnnnnnnnnnnnnnnnnnnnnnnnnnnnnnnnnnnnnnnnnnnnnnnnnnnnnnnnnnnnnnnnnnnnnnnnnnnnnnnnnnnnnnnnnnnnnnnnnnnnnnnnnnnnnnnnnnnnnnnnnnnnnnnnnnnnnnnnnnnnnnnnnnnnnnnnnnnnnnnnnnnnnnnnnnnnnnnnnnnnnnnnnnnnnnnnnnnnnnnnnnnnnnnnnnnnnnnnnnnnnnnnnnnnnnnnnnnnnnnnnnnnnnnnnnnnnnnnnnnnnnnnnnnnnnnnnnnnnnnnnnnnnnnnnnnnnnnnnnnnnnnnnnnnnnnnnnnnnnnnnnnnnnnnnnnnnnnnnnnnnnnnnnnnnnnnnnnnnnnnnnnnnnnnnnnnnnnnnnnnnnnnnnnnnnnnnnnnnnnnnnnnnnnnnnnnnnnnnnnnnnnnnnnnnnnnnnnnnnnnnnnnnnnnnnnnnnnnnnnnnnnnnnnnnnnnnnnnnnnnnnnnnnnnnnnnnnnnnnnnnnnnnnnnnnnnnnnnnnnnnnnnnnnnnnnnnnnnnnnnnnnnnnnnnnnnnnnnnnnnnnnnnnnnnnnnnnnnnnnnnnnnnnnnnnnnnnnnnnnnnnnnnnnnnnnnnnnnnnnnnnnnnnnnnnnnnnnnnnnnnnnnnnnnnnnnnnnnnnnnnnnnnnnnnnnnnnnnnnnnnnnnnnnnnnnnnnnnnnnnnnnnnnnnnnnnnnnnnnnnnnnnnnnnnnnnnnnnnnnnnnnnnnnnnnnnnnnnnnnnnnnnnnnnnnnnnnnnnnnnnnnnnnnnnnnnnnnnnnnnnnnnnnnnnnnnnnnnnnnnnnnnnnnnnnnnnnnnnnnnnnnnnnnnnnnnnnnnnnnnnnnnnnnnnnnnnnnnnnnnnnnnnnnnnnnnnnnnnnnnnnnnnnnnnnnnnnnnnnnnnnnnnnnnnnnnnnnnnnnnnnnnnnnnnnnnnnnnnnnnnnnnnnnnnnnnnnnnnnnnnnnnnnnnnnnnnnnnnnnnnnnnnnnnnnnnnnnnnnnnnnnnnnnnnnnnnnnnnnnnnnnnnnnnnnnnnnnnnnnnnnnnnnnnnnnnnnnnnnnnnnnnnnnnnnnnnnnnnnnnnnnnnnnnnnnnnnnnnnnnnnnnnnnnnnnnnnnnnnnnnnnnnnnnnnnnnnnnnnnnnnnnnnnnnnnnnnnnnnnnnnnnnnnnnnnnnnnnnnnnnnnnnnnnnnnnnnnnnnnnnnnnnnnnnnnnnnnnnnnnnnnnnnnnnnnnnnnnnnnnnnnnnnnnnnnnnnnnnnnnnnnnnnnnnnnnnnnnnnnnnnnnnnnnnnnnnnnnnnnnnnnnnnnnnnnnnnnnnnnnnnnnnnnnnnnnnnnnnnnnnnnnnnnnnnnnnnnnnnnnnnnnnnnnnnnnnnnnnnnnnnnnnnnnnnnnnnnnnnnnnnnnnnnnnnnnnnnnnnnnnnnnnnnnnnnnnnnnnnnnnnnnnnnnnnnnnnnnnnnnnnnnnnnnnnnnnnnnnnnnnnnnnnnnnnnnnnnnnnnnnnnnnnnnnnnnnnnnnnnnnnnnnnnnnnnnnnnnnnnnnnnnnnnnnnnnnnnnnnnnnnnnnnnnnnnnnnnnnnnnnnnnnnnnnnnnnnnnnnnnnnnnnnnnnnnnnnnnnnnnnnnnnnnnnnnnnnnnnnnnnnnnnnnnnnnnnnnnnnnnnnnnnnnnnnnnnnnnnnnnnnnnnnnnnnnnnnnnnnnnnnnnnnnnnnnnnnnnnnnnnnnnnnnnnnnnnnnnnnnnnnnnnnnnnnnnnnnnnnnnnnnnnnnnnnnnnnnnnnnnnnnnnnnnnnnnnnnnnnnnnnnnnnnnnnnnnnnnnnnnnnnnnnnnnnnnnnnnnnnnnnnnnnnnnnnnnnnnnnnnnnnnnnnnnnnnnnnnnnnnnnnnnnnnnnnnnnnnnnnnnnnnnnnnnnnnnnnnnnnnnnnnnnnnnnnnnnnnnnnnnnnnnnnnnnnnnnnnnnnnnnnnnnnnnnnnnnnnnnnnnnnnnnnnnnnnnnnnnnnnnnnnnnnnnnnnnnnnnnnnnnnnnnnnnnnnnnnnnnnnnnnnnnnnnnnnnnnnnnnnnnnnnnnnnnnnnnnnnnnnnnnnnnnnnnnnnnnnnnnnnnnnnnnnnnnnnnnnnnnnnnnnnnnnnnnnnnnnnnnnnnnnnnnnnnnnnnnnnnnnnnnnnnnnnnnnnnnnnnnnnnnnnnnnnnnnnnnnnnnnnnnnnnnnnnnnnnnnnnnnnnnnnnnnnnnnnnnnnnnnnnnnnnnnnnnnnnnnnnnnnnnnnnnnnnnnnnnnnnnnnnnnnnnnnnnnnnnnnnnnnnnnnnnnnnnnnnnnnnnnnnnnnnnnnnnnnnnnnnnnnnnnnnnnnnnnnnnnnnnnnnnnnnnnnnnnnnnnnnnnnnnnnnnnnnnnnnnnnnnnnnnnnnnnnnnnnnnnnnnnnnnnnnnnnnnnnnnnnnnnnnnnnnnnnnnnnnnnnnnnnnnnnnnnnnnnnnnnnnnnnnnnnnnnnnnnnnnnnnnnnnnnnnnnnnnnnnnnnnnnnnnnnnnnnnnnnnnnnnnnnnnnnnnnnnnnnnnnnnnnnnnnnnnnnnnnnnnnnnnnnnnnnnnnnnnnnnnnnnnnnnnnnnnnnnnnnnnnnnnnnnnnnnnnnnnnnnnnnnnnnnnnnnnnnnnnnnnnnnnnnnnnnnnnnnnnnnnnnnnnnnnnnnnnnnnnnnnnnnnnnnnnnnnnnnnnnnnnnnnnnnnnnnnnnnnnnnnnnnnnnnnnnnnnnnnnnnnnnnnnnnnnnnnnnnnnnnnnnnnnnnnnnnnnnnnnnnnnnnnnnnnnnnnnnnnnnnnnnnnnnnnnnnnnnnnnnnnnnnnnnnnnnnnnnnnnnnnnnnnnnnnnnnnnnnnnnnnnnnnnnnnnnnnnnnnnnnnnnnnnnnnnnnnnnnnnnnnnnnnnnnnnnnnnnnnnnnnnnnnnnnnnnnnnnnnnnnnnnnnnnnnnnnnnnnnnnnnnnnnnnnnnnnnnnnnnnnnnnnnnnnnnnnnnnnnnnnnnnnnnnnnnnnnnnnnnnnnnnnnnnnnnnnnnnnnnnnnnnnnnnnnnnnnnnnnnnnnnnnnnnnnnnnnnnnnnnnnnnnnnnnnnnnnnnnnnnnnnnnnnnnnnnnnnnnnnnnnnnnnnnnnnnnnnnnnnnnnnnnnnnnnnnnnnnnnnnnnnnnnnnnnnnnnnnnnnnnnnnnnnnnnnnnnnnnnnnnnnnnnnnnnnnnnnnnnnnnnnnnnnnnnnnnnnnnnnnnnnnnnnnnnnnnnnnnnnnnnnnnnnnnnnnnnnnnnnnnnnnnnnnnnnnnnnnnnnnnnnnnnnnnnnnnnnnnnnnnnnnnnnnnnnnnnnnnnnnnnnnnnnnnnnnnnnnnnnnnnnnnnnnnnnnnnnnnnnnnnnnnnnnnnnnnnnnnnnnnnnnnnnnnnnnnnnnnnnnnnnnnnnnnnnnnnnnnnnnnnnnnnnnnnnnnnnnnnnnnnnnnnnnnnnnnnnnnnnnnnnnnnnnnnnnnnnnnnnnnnnnnnnnnnnnnnnnnnnnnnnnnnnnnnnnnnnnnnnnnnnnnnnnnnnnnnnnnnnnnnnnnnnnnnnnnnnnnnnnnnnnnnnnnnnnnnnnnnnnnnnnnnnnnnnnnnnnnnnnnnnnnnnnnnnnnnnnnnnnnnnnnnnnnnnnnnnnnnnnnnnnnnnnnnnnnnnnnnnnnnnnnnnnnnnnnnnnnnnnnnnnnnnnnnnnnnnnnnnnnnnnnnnnnnnnnnnnnnnnnnnnnnnnnnnnnnnnnnnnnnnnnnnnnnnnnnnnnnnnnnnnnnnnnnnnnnnnnnnnnnnnnnnnnnnnnnnnnnnnnnnnnnnnnnnnnnnnnnnnnnnnnnnnnnnnnnnnnnnnnnnnnnnnnnnnnnnnnnnnnnnnnnnnnnnnnnnnnnnnnnnnnnnnnnnnnnnnnnnnnnnnnnnnnnnnnnnnnnnnnnnnnnnnnnnnnnnnnnnnnnnnnnnnnnnnnnnnnnnnnnnnnnnnnnnnnnnnnnnnnnnnnnnnnnnnnnnnnnnnnnnnnnnnnnnnnnnnnnnnnnnnnnnnnnnnnnnnnnnnnnnnnnnnnnnnnnnnnnnnnnnnnnnnnnnnnnnnnnnnnnnnnnnnnnnnnnnnnnnnnnnnnnnnnnnnnnnnnnnnnnnnnnnnnnnnnnnnnnnnnnnnnnnnnnnnnnnnnnnnnnnnnnnnnnnnnnnnnnnnnnnnnnnnnnnnnnnnnnnnnnnnnnnnnnnnnnnnnnnnnnnnnnnnnnnnnnnnnnnnnnnnnnnnnnnnnnnnnnnnnnnnnnnnnnnnnnnnnnnnnnnnnnnnnnnnnnnnnnnnnnnnnnnnnnnnnnnnnnnnnnnnnnnnnnnnnnnnnnnnnnnnnnnnnnnnnnnnnnnnnnnnnnnnnnnnnnnnnnnnnnnnnnnnnnnnnnnnnnnnnnnnnnnnnnnnnnnnnnnnnnnnnnnnnnnnnnnnnnnnnnnnnnnnnnnnnnnnnnnnnnnnnnnnnnnnnnnnnnnnnnnnnnnnnnnnnnnnnnnnnnnnnnnnnnnnnnnnnnnnnnnnnnnnnnnnnnnnnnnnnnnnnnnnnnnnnnnnnnnnnnnnnnnnnnnnnnnnnnnnnnnnnnnnnnnnnnnnnnnnnnnnnnnnnnnnnnnnnnnnnnnnnnnnnnnnnnnnnnnnnnnnnnnnnnnnnnnnnnnnnnnnnnnnnnnnnnnnnnnnnnnnnnnnnnnnnnnnnnnnnnnnnnnnnnnnnnnnnnnnnnnnnnnnnnnnnnnnnnnnnnnnnnnnnnnnnnnnnnnnnnnnnnnnnnnnnnnnnnnnnnnnnnnnnnnnnnnnnnnnnnnnnnnnnnnnnnnnnnnnnnnnnnnnnnnnnnnnnnnnnnnnnnnnnnnnnnnnnnnnnnnnnnnnnnnnnnnnnnnnnnnnnnnnnnnnnnnnnnnnnnnnnnnnnnnnnnnnnnnnnnnnnnnnnnnnnnnnnnnnnnnnnnnnnnnnnnnnnnnnnnnnnnnnnnnnnnnnnnnnnnnnnnnnnnnnnnnnnnnnnnnnnnnnnnnnnnnnnnnnnnnnnnnnnnnnnnnnnnnnnnnnnnnnnnnnnnnnnnnnnnnnnnnnnnnnnnnnnnnnnnnnnnnnnnnnnnnnnnnnnnnnnnnnnnnnnnnnnnnnnnnnnnnnnnnnnnnnnnnnnnnnnnnnnnnnnnnnnnnnnnnnnnnnnnnnnnnnnnnnnnnnnnnnnnnnnnnnnnnnnnnnnnnnnnnnnnnnnnnnnnnnnnnnnnnnnnnnnnnnnnnnnnnnnnnnnnnnnnnnnnnnnnnnnnnnnnnnnnnnnnnnnnnnnnnnnnnnnnnnnnnnnnnnnnnnnnnnnnnnnnnnnnnnnnnnnnnnnnnnnnnnnnnnnnnnnnnnnnnnnnnnnnnnnnnnnnnnnnnnnnnnnnnnnnnnnnnnnnnnnnnnnnnnnnnnnnnnnnnnnnnnnnnnnnnnnnnnnnnnnnnnnnnnnnnnnnnnnnnnnnnnnnnnnnnnnnnnnnnnnnnnnnnnnnnnnnnnnnnnnnnnnnnnnnnnnnnnnnnnnnnnnnnnnnnnnnnnnnnnnnnnnnnnnnnnnnnnnnnnnnnnnnnnnnnnnnnnnnnnnnnnnnnnnnnnnnnnnnnnnnnnnnnnnnnnnnnnnnnnnnnnnnnnnnnnnnnnnnnnnnnnnnnnnnnnnnnnnnnnnnnnnnnnnnnnnnnnnnnnnnnnnnnnnnnnnnnnnnnnnnnnnnnnnnnnnnnnnnnnnnnnnnnnnnnnnnnnnnnnnnnnnnnnnnnnnnnnnnnnnnnnnnnnnnnnnnnnnnnnnnnnnnnnnnnnnnnnnnnnnnnnnnnnnnnnnnnnnnnnnnnnnnnnnnnnnnnnnnnnnnnnnnnnnnnnnnnnnnnnnnnnnnnnnnnnnnnnnnnnnnnnnnnnnnnnnnnnnnnnnnnnnnnnnnnnnnnnnnnnnnnnnnnnnnnnnnnnnnnnnnnnnnnnnnnnnnnnnnnnnnnnnnnnnnnnnnnnnnnnnnnnnnnnnnnnnnnnnnnnnnnnnnnnnnnnnnnnnnnnnnnnnnnnnnnnnnnnnnnnnnnnnnnnnnnnnnnnnnnnnnnnnnnnnnnnnnnnnnnnnnnnnnnnnnnnnnnnnnnnnnnnnnnnnnnnnnnnnnnnnnnnnnnnnnnnnnnnnnnnnnnnnnnnnnnnnnnnnnnnnnnnnnnnnnnnnnnnnnnnnnnnnnnnnnnnnnnnnnnnnnnnnnnnnnnnnnnnnnnnnnnnnnnnnnnnnnnnnnnnnnnnnnnnnnnnnnnnnnnnnnnnnnnnnnnnnnnnnnnnnnnnnnnnnnnnnnnnnnnnnnnnnnnnnnnnnnnnnnnnnnnnnnnnnnnnnnnnnnnnnnnnnnnnnnnnnnnnnnnnnnnnnnnnnnnnnnnnnnnnnnnnnnnnnnnnnnnnnnnnnnnnnnnnnnnnnnnnnnnnnnnnnnnnnnnnnnnnnnnnnnnnnnnnnnnnnnnnnnnnnnnnnnnnnnnnnnnnnnnnnnnnnnnnnnnnnnnnnnnnnnnnnnnnnnnnnnnnnnnnnnnnnnnnnnnnnnnnnnnnnnnnnnnnnnnnnnnnnnnnnnnnnnnnnnnnnnnnnnnnnnnnnnnnnnnnnnnnnnnnnnnnnnnnnnnnnnnnnnnnnnnnnnnnnnnnnnnnnnnnnnnnnnnnnnnnnnnnnnnnnnnnnnnnnnnnnnnnnnnnnnnnnnnnnnnnnnnnnnnnnnnnnnnnnnnnnnnnnnnnnnnnnnnnnnnnnnnnnnnnnnnnnnnnnnnnnnnnnnnnnnnnnnnnnnnnnnnnnnnnnnnnnnnnnnnnnnnnnnnnnnnnnnnnnnnnnnnnnnnnnnnnnnnnnnnnnnnnnnnnnnnnnnnnnnnnnnnnnnnnnnnnnnnnnnnnnnnnnnnnnnnnnnnnnnnnnnnnnnnnnnnnnnnnnnnnnnnnnnnnnnnnnnnnnnnnnnnnnnnnnnnnnnnnnnnnnnnnnnnnnnnnnnnnnnnnnnnnnnnnnnnnnnnnnnnnnnnnnnnnnnnnnnnnnnnnnnnnnnnnnnnnnnnnnnnnnnnnnnnnnnnnnnnnnnnnnnnnnnnnnnnnnnnnnnnnnnnnnnnnnnnnnnnnnnnnnnnnnnnnnnnnnnnnnnnnnnnnnnnnnnnnnnnnnnnnnnnnnnnnnnnnnnnnnnnnnnnnnnnnnnnnnnnnnnnnnnnnnnnnnnnnnnnnnnnnnnnnnnnnnnnnnnnnnnnnnnnnnnnnnnnnnnnnnnnnnnnnnnnnnnnnnnnnnnnnnnnnnnnnnnnnnnnnnnnnnnnnnnnnnnnnnnnnnnnnnnnnnnnnnnnnnnnnnnnnnnnnnnnnnnnnnnnnnnnnnnnnnnnnnnnnnnnnnnnnnnnnnnnnnnnnnnnnnnnnnnnnnnnnnnnnnnnnnnnnnnnnnnnnnnnnnnnnnnnnnnnnnnnnnnnnnnnnnnnnnnnnnnnnnnnnnnnnnnnnnnnnnnnnnnnnnnnnnnnnnnnnnnnnnnnnnnnnnnnnnnnnnnnnnnnnnnnnnnnnnnnnnnnnnnnnnnnnnnnnnnnnnnnnnnnnnnnnnnnnnnnnnnnnnnnnnnnnnnnnnnnnnnnnnnnnnnnnnnnnnnnnnnnnnnnnnnnnnnnnnnnnnnnnnnnnnnnnnnnnnnnnnnnnnnnnnnnnnnnnnnnnnnnnnnnnnnnnnnnnnnnnnnnnnnnnnnnnnnnnnnnnnnnnnnnnnnnnnnnnnnnnnnnnnnnnnnnnnnnnnnnnnnnnnnnnnnnnnnnnnnnnnnnnnnnnnnnnnnnnnnnnnnnnnnnnnnnnnnnnnnnnnnnnnnnnnnnnnnnnnnnnnnnnnnnnnnnnnnnnnnnnnnnnnnnnnnnnnnnnnnnnnnnnnnnnnnnnnnnnnnnnnnnnnnnnnnnnnnnnnnnnnnnnnnnnnnnnnnnnnnnnnnnnnnnnnnnnnnnnnnnnnnnnnnnnnnnnnnnnnnnnnnnnnnnnnnnnnnnnnnnnnnnnnnnnnnnnnnnnnnnnnnnnnnnnnnnnnnnnnnnnnnnnnnnnnnnnnnnnnnnnnnnnnnnnnnnnnnnnnnnnnnnnnnnnnnnnnnnnnnnnnnnnnnnnnnnnnnnnnnnnnnnnnnnnnnnnnnnnnnnnnnnnnnnnnnnnnnnnnnnnnnnnnnnnnnnnnnnnnnnnnnnnnnnnnnnnnnnnnnnnnnnnnnnnnnnnnnnnnnnnnnnnnnnnnnnnnnnnnnnnnnnnnnnnnnnnnnnnnnnnnnnnnnnnnnnnnnnnnnnnnnnnnnnnnnnnnnnnnnnnnnnnnnnnnnnnnnnnnnnnnnnnnnnnnnnnnnnnnnnnnnnnnnnnnnnnnnnnnnnnnnnnnnnnnnnnnnnnnnnnnnnnnnnnnnnnnnnnnnnnnnnnnnnnnnnnnnnnnnnnnnnnnnnnnnnnnnnnnnnnnnnnnnnnnnnnnnnnnnnnnnnnnnnnnnnnnnnnnnnnnnnnnnnnnnnnnnnnnnnnnnnnnnnnnnnnnnnnnnnnnnnnnnnnnnnnnnnnnnnnnnnnnnnnnnnnnnnnnnnnnnnnnnnnnnnnnnnnnnnnnnnnnnnnnnnnnnnnnnnnnnnnnnnnnnnnnnnnnnnnnnnnnnnnnnnnnnnnnnnnnnnnnnnnnnnnnnnnnnnnnnnnnnnnnnnnnnnnnnnnnnnnnnnnnnnnnnnnnnnnnnnnnnnnnnnnnnnnnnnnnnnnnnnnnnnnnnnnnnnnnnnnnnnnnnnnnnnnnnnnnnnnnnnnnnnnnnnnnnnnnnnnnnnnnnnnnnnnnnnnnnnnnnnnnnnnnnnnnnnnnnnnnnnnnnnnnnnnnnnnnnnnnnnnnnnnnnnnnnnnnnnnnnnnnnnnnnnnnnnnnnnnnnnnnnnnnnnnnnnnnnnnnnnnnnnnnnnnnnnnnnnnnnnnnnnnnnnnnnnnnnnnnnnnnnnnnnnnnnnnnnnnnnnnnnnnnnnnnnnnnnnnnnnnnnnnnnnnnnnnnnnnnnnnnnnnnnnnnnnnnnnnnnnnnnnnnnnnnnnnnnnnnnnnnnnnnnnnnnnnnnnnnnnnnnnnnnnnnnnnnnnnnnnnnnnnnnnnnnnnnnnnnnnnnnnnnnnnnnnnnnnnnnnnnnnnnnnnnnnnnnnnnnnnnnnnnnnnnnnnnnnnnnnnnnnnnnnnnnnnnnnnnnnnnnnnnnnnnnnnnnnnnnnnnnnnnnnnnnnnnnnnnnnnnnnnnnnnnnnnnnnnnnnnnnnnnnnnnnnnnnnnnnnnnnnnnnnnnnnnnnnnnnnnnnnnnnnnnnnnnnnnnnnnnnnnnnnnnnnnnnnnnnnnnnnnnnnnnnnnnnnnnnnnnnnnnnnnnnnnnnnnnnnnnnnnnnnnnnnnnnnnnnnnnnnnnnnnnnnnnnnnnnnnnnnnnnnnnnnnnnnnnnnnnnnnnnnnnnnnnnnnnnnnnnnnnnnnnnnnnnnnnnnnnnnnnnnnnnnnnnnnnnnnnnnnnnnnnnnnnnnnnnnnnnnnnnnnnnnnnnnnnnnnnnnnnnnnnnnnnnnnnnnnnnnnnnnnnnnnnnnnnnnnnnnnnnnnnnnnnnnnnnnnnnnnnnnnnnnnnnnnnnnnnnnnnnnnnnnnnnnnnnnnnnnnnnnnnnnnnnnnnnnnnnnnnnnnnnnnnnnnnnnnnnnnnnnnnnnnnnnnnnnnnnnnnnnnnnnnnnnnnnnnnnnnnnnnnnnnnnnnnnnnnnnnnnnnnnnnnnnnnnnnnnnnnnnnnnnnnnnnnnnnnnnnnnnnnnnnnnnnnnnnnnnnnnnnnnnnnnnnnnnnnnnnnnnnnnnnnnnnnnnnnnnnnnnnnnnnnnnnnnnnnnnnnnnnnnnnnnnnnnnnnnnnnnnnnnnnnnnnnnnnnnnnnnnnnnnnnnnnnnnnnnnnnnnnnnnnnnnnnnnnnnnnnnnnnnnnnnnnnnnnnnnnnnnnnnnnnnnnnnnnnnnnnnnnnnnnnnnnnnnnnnnnnnnnnnnnnnnnnnnnnnnnnnnnnnnnnnnnnnnnnnnnnnnnnnnnnnnnnnnnnnnnnnnnnnnnnnnnnnnnnnnnnnnnnnnnnnnnnnnnnnnnnnnnnnnnnnnnnnnnnnnnnnnnnnnnnnnnnnnnnnnnnnnnnnnnnnnnnnnnnnnnnnnnnnnnnnnnnnnnnnnnnnnnnnnnnnnnnnnnnnnnnnnnnnnnnnnnnnnnnnnnnnnnnnnnnnnnnnnnnnnnnnnnnnnnnnnnnnnnnnnnnnnnnnnnnnnnnnnnnnnnnnnnnnnnnnnnnnnnnnnnnnnnnnnnnnnnnnnnnnnnnnnnnnnnnnnnnnnnnnnnnnnnnnnnnnnnnnnnnnnnnnnnnnnnnnnnnnnnnnnnnnnnnnnnnnnnnnnnnnnnnnnnnnnnnnnnnnnnnnnnnnnnnnnnnnnnnnnnnnnnnnnnnnnnnnnnnnnnnnnnnnnnnnnnnnnnnnnnnnnnnnnnnnnnnnnnnnnnnnnnnnnnnnnnnnnnnnnnnnnnnnnnnnnnnnnnnnnnnnnnnnnnnnnnnnnnnnnnnnnnnnnnnnnnnnnnnnnnnnnnnnnnnnnnnnnnnnnnnnnnnnnnnnnnnnnnnnnnnnnnnnnnnnnnnnnnnnnnnnnnnnnnnnnnnnnnnnnnnnnnnnnnnnnnnnnnnnnnnnnnnnnnnnnnnnnnnnnnnnnnnnnnnnnnnnnnnnnnnnnnnnnnnnnnnnnnnnnnnnnnnnnnnnnnnnnnnnnnnnnnnnnnnnnnnnnnnnnnnnnnnnnnnnnnnnnnnnnnnnnnnnnnnnnnnnnnnnnnnnnnnnnnnnnnnnnnnnnnnnnnnnnnnnnnnnnnnnnnnnnnnnnnnnnnnnnnnnnnnnnnnnnnnnnnnnnnnnnnnnnnnnnnnnnnnnnnnnnnnnnnnnnnnnnnnnnnnnnnnnnnnnnnnnnnnnnnnnnnnnnnnnnnnnnnnnnnnnnnnnnnnnnnnnnnnnnnnnnnnnnnnnnnnnnnnnnnnnnnnnnnnnnnnnnnnnnnnnnnnnnnnnnnnnnnnnnnnnnnnnnnnnnnnnnnnnnnnnnnnnnnnnnnnnnnnnnnnnnnnnnnnnnnnnnnnnnnnnnnnnnnnnnnnnnnnnnnnnnnnnnnnnnnnnnnnnnnnnnnnnnnnnnnnnnnnnnnnnnnnnnnnnnnnnnnnnnnnnnnnnnnnnnnnnnnnnnnnnnnnnnnnnnnnnnnnnnnnnnnnnnnnnnnnnnnnnnnnnnnnnnnnnnnnnnnnnnnnnnnnnnnnnnnnnnnnnnnnnnnnnnnnnnnnnnnnnnnnnnnnnnnnnnnnnnnnnnnnnnnnnnnnnnnnnnnnnnnnnnnnnnnnnnnnnnnnnnnnnnnnnnnnnnnnnnnnnnnnnnnnnnnnnnnnnnnnnnnnnnnnnnnnnnnnnnnnnnnnnnnnnnnnnnnnnnnnnnnnnnnnnnnnnnnnnnnnnnnnnnnnnnnnnnnnnnnnnnnnnnnnnnnnnnnnnnnnnnnnnnnnnnnnnnnnnnnnnnnnnnnnnnnnnnnnnnnnnnnnnnnnnnnnnnnnnnnnnnnnnnnnnnnnnnnnnnnnnnnnnnnnnnnnnnnnnnnnnnnnnnnnnnnnnnnnnnnnnnnnnnnnnnnnnnnnnnnnnnnnnnnnnnnnnnnnnnnnnnnnnnnnnnnnnnnnnnnnnnnnnnnnnnnnnnnnnnnnnnnnnnnnnnnnnnnnnnnnnnnnnnnnnnnnnnnnnnnnnnnnnnnnnnnnnnnnnnnnnnnnnnnnnnnnnnnnnnnnnnnnnnnnnnnnnnnnnnnnnnnnnnnnnnnnnnnnnnnnnnnnnnnnnnnnnnnnnnnnnnnnnnnnnnnnnnnnnnnnnnnnnnnnnnnnnnnnnnnnnnnnnnnnnnnnnnnnnnnnnnnnnnnnnnnnnnnnnnnnnnnnnnnnnnnnnnnnnnnnnnnnnnnnnnnnnnnnnnnnnnnnnnnnnnnnnnnnnnnnnnnnnnnnnnnnnnnnnnnnnnnnnnnnnnnnnnnnnnnnnnnnnnnnnnnnnnnnnnnnnnnnnnnnnnnnnnnnnnnnnnnnnnnnnnnnnnnnnnnnnnnnnnnnnnnnnnnnnnnnnnnnnnnnnnnnnnnnnnnnnnnnnnnnnnnnnnnnnnnnnnnnnnnnnnnnnnnnnnnnnnnnnnnnnnnnnnnnnnnnnnnnnnnnnnnnnnnnnnnnnnnnnnnnnnnnnnnnnnnnnnnnnnnnnnnnnnnnnnnnnnnnnnnnnnnnnnnnnnnnnnnnnnnnnnnnnnnnnnnnnnnnnnnnnnnnnnnnnnnnnnnnnnnnnnnnnnnnnnnnnnnnnnnnnnnnnnnnnnnnnnnnnnnnnnnnnnnnnnnnnnnnnnnnnnnnnnnnnnnnnnnnnnnnnnnnnnnnnnnnnnnnnnnnnnnnnnnnnnnnnnnnnnnnnnnnnnnnnnnnnnnnnnnnnnnnnnnnnnnnnnnnnnnnnnnnnnnnnnnnnnnnnnnnnnnnnnnnnnnnnnnnnnnnnnnnnnnnnnnnnnnnnnnnnnnnnnnnnnnnnnnnnnnnnnnnnnnnnnnnnnnnnnnnnnnnnnnnnnnnnnnnnnnnnnnnnnnnnnnnnnnnnnnnnnnnnnnnnnnnnnnnnnnnnnnnnnnnnnnnnnnnnnnnnnnnnnnnnnnnnnnnnnnnnnnnnnnnnnnnnnnnnnnnnnnnnnnnnnnnnnnnnnnnnnnnnnnnnnnnnnnnnnnnnnnnnnnnnnnnnnnnnnnnnnnnnnnnnnnnnnnnnnnnnnnnnnnnnnnnnnnnnnnnnnnnnnnnnnnnnnnnnnnnnnnnnnnnnnnnnnnnnnnnnnnnnnnnnnnnnnnnnnnnnnnnnnnnnnnnnnnnnnnnnnnnnnnnnnnnnnnnnnnnnnnnnnnnnnnnnnnnnnnnnnnnnnnnnnnnnnnnnnnnnnnnnnnnnnnnnnnnnnnnnnnnnnnnnnnnnnnnnnnnnnnnnnnnnnnnnnnnnnnnnnnnnnnnnnnnnnnnnnnnnnnnnnnnnnnnnnnnnnnnnnnnnnnnnnnnnnnnnnnnnnnnnnnnnnnnnnnnnnnnnnnnnnnnnnnnnnnnnnnnnnnnnnnnnnnnnnnnnnnnnnnnnnnnnnnnnnnnnnnnnnnnnnnnnnnnnnnnnnnnnnnnnnnnnnnnnnnnnnnnnnnnnnnnnnnnnnnnnnnnnnnnnnnnnnnnnnnnnnnnnnnnnnnnnnnnnnnnnnnnnnnnnnnnnnnnnnnnnnnnnnnnnnnnnnnnnnnnnnnnnnnnnnnnnnnnnnnnnnnnnnnnnnnnnnnnnnnnnnnnnnnnnnnnnnnnnnnnnnnnnnnnnnnnnnnnnnnnnnnnnnnnnnnnnnnnnnnnnnnnnnnnnnnnnnnnnnnnnnnnnnnnnnnnnnnnnnnnnnnnnnnnnnnnnnnnnnnnnnnnnnnnnnnnnnnnnnnnnnnnnnnnnnnnnnnnnnnnnnnnnnnnnnnnnnnnnnnnnnnnnnnnnnnnnnnnnnnnnnnnnnnnnnnnnnnnnnnnnnnnnnnnnnnnnnnnnnnnnnnnnnnnnnnnnnnnnnnnnnnnnnnnnnnnnnnnnnnnnnnnnnnnnnnnnnnnnnnnnnnnnnnnnnnnnnnnnnnnnnnnnnnnnnnnnnnnnnnnnnnnnnnnnnnnnnnnnnnnnnnnnnnnnnnnnnnnnnnnnnnnnnnnnnnnnnnnnnnnnnnnnnnnnnnnnnnnnnnnnnnnnnnnnnnnnnnnnnnnnnnnnnnnnnnnnnnnnnnnnnnnnnnnnnnnnnnnnnnnnnnnnnnnnnnnnnnnnnnnnnnnnnnnnnnnnnnnnnnnnnnnnnnnnnnnnnnnnnnnnnnnnnnnnnnnnnnnnnnnnnnnnnnnnnnnnnnnnnnnnnnnnnnnnnnnnnnnnnnnnnnnnnnnnnnnnnnnnnnnnnnnnnnnnnnnnnnnnnnnnnnnnnnnnnnnnnnnnnnnnnnnnnnnnnnnnnnnnnnnnnnnnnnnnnnnnnnnnnnnnnnnnnnnnnnnnnnnnnnnnnnnnnnnnnnnnnnnnnnnnnnnnnnnnnnnnnnnnnnnnnnnnnnnnnnnnnnnnnnnnnnnnnnnnnnnnnnnnnnnnnnnnnnnnnnnnnnnnnnnnnnnnnnnnnnnnnnnnnnnnnnnnnnnnnnnnnnnnnnnnnnnnnnnnnnnnnnnnnnnnnnnnnnnnnnnnnnnnnnnnnnnnnnnnnnnnnnnnnnnnnnnnnnnnnnnnnnnnnnnnnnnnnnnnnnnnnnnnnnnnnnnnnnnnnnnnnnnnnnnnnnnnnnnnnnnnnnnnnnnnnnnnnnnnnnnnnnnnnnnnnnnnnnnnnnnnnnnnnnnnnnnnnnnnnnnnnnnnnnnnnnnnnnnnnnnnnnnnnnnnnnnnnnnnnnnnnnnnnnnnnnnnnnnnnnnnnnnnnnnnnnnnnnnnnnnnnnnnnnnnnnnnnnnnnnnnnnnnnnnnnnnnnnnnnnnnnnnnnnnnnnnnnnnnnnnnnnnnnnnnnnnnnnnnnnnnnnnnnnnnnnnnnnnnnnnnnnnnnnnnnnnnnnnnnnnnnnnnnnnnnnnnnnnnnnnnnnnnnnnnnnnnnnnnnnnnnnnnnnnnnnnnnnnnnnnnnnnnnnnnnnnnnnnnnnnnnnnnnnnnnnnnnnnnnnnnnnnnnnnnnnnnnnnnnnnnnnnnnnnnnnnnnnnnnnnnnnnnnnnnnnnnnnnnnnnnnnnnnnnnnnnnnnnnnnnnnnnnnnnnnnnnnnnnnnnnnnnnnnnnnnnnnnnnnnnnnnnnnnnnnnnnnnnnnnnnnnnnnnnnnnnnnnnnnnnnnnnnnnnnnnnnnnnnnnnnnnnnnnnnnnnnnnnnnnnnnnnnnnnnnnnnnnnnnnnnnnnnnnnnnnnnnnnnnnnnnnnnnnnnnnnnnnnnnnnnnnnnnnnnnnnnnnnnnnnnnnnnnnnnnnnnnnnnnnnnnnnnnnnnnnnnnnnnnnnnnnnnnnnnnnnnnnnnnnnnnnnnnnnnnnnnnnnnnnnnnnnnnnnnnnnnnnnnnnnnnnnnnnnnnnnnnnnnnnnnnnnnnnnnnnnnnnnnnnnnnnnnnnnnnnnnnnnnnnnnnnnnnnnnnnnnnnnnnnnnnnnnnnnnnnnnnnnnnnnnnnnnnnnnnnnnnnnnnnnnnnnnnnnnnnnnnnnnnnnnnnnnnnnnnnnnnnnnnnnnnnnnnnnnnnnnnnnnnnnnnnnnnnnnnnnnnnnnnnnnnnnnnnnnnnnnnnnnnnnnnnnnnnnnnnnnnnnnnnnnnnnnnnnnnnnnnnnnnnnnnnnnnnnnnnnnnnnnnnnnnnnnnnnnnnnnnnnnnnnnnnnnnnnnnnnnnnnnnnnnnnnnnnnnnnnnnnnnnnnnnnnnnnnnnnnnnnnnnnnnnnnnnnnnnnnnnnnnnnnnnnnnnnnnnnnnnnnnnnnnnnnnnnnnnnnnnnnnnnnnnnnnnnnnnnnnnnnnnnnnnnnnnnnnnnnnnnnnnnnnnnnnnnnnnnnnnnnnnnnnnnnnnnnnnnnnnnnnnnnnnnnnnnnnnnnnnnnnnnnnnnnnnnnnnnnnnnnnnnnnnnnnnnnnnnnnnnnnnnnnnnnnnnnnnnnnnnnnnnnnnnnnnnnnnnnnnnnnnnnnnnnnnnnnnnnnnnnnnnnnnnnnnnnnnnnnnnnnnnnnnnnnnnnnnnnnnnnnnnnnnnnnnnnnnnnnnnnnnnnnnnnnnnnnnnnnnnnnnnnnnnnnnnnnnnnnnnnnnnnnnnnnnnnnnnnnnnnnnnnnnnnnnnnnnnnnnnnnnnnnnnnnnnnnnnnnnnnnnnnnnnnnnnnnnnnnnnnnnnnnnnnnnnnnnnnnnnnnnnnnnnnnnnnnnnnnnnnnnnnnnnnnnnnnnnnnnnnnnnnnnnnnnnnnnnnnnnnnnnnnnnnnnnnnnnnnnnnnnnnnnnnnnnnnnnnnnnnnnnnnnnnnnnnnnnnnnnnnnnnnnnnnnnnnnnnnnnnnnnnnnnnnnnnnnnnnnnnnnnnnnnnnnnnnnnnnnnnnnnnnnnnnnnnnnnnnnnnnnnnnnnnnnnnnnnnnnnnnnnnnnnnnnnnnnnnnnnnnnnnnnnnnnnnnnnnnnnnnnnnnnnnnnnnnnnnnnnnnnnnnnnnnnnnnnnnnnnnnnnnnnnnnnnnnnnnnnnnnnnnnnnnnnnnnnnnnnnnnnnnnnnnnnnnnnnnnnnnnnnnnnnnnnnnnnnnnnnnnnnnnnnnnnnnnnnnnnnnnnnnnnnnnnnnnnnnnnnnnnnnnnnnnnnnnnnnnnnnnnnnnnnnnnnnnnnnnnnnnnnnnnnnnnnnnnnnnnnnnnnnnnnnnnnnnnnnnnnnnnnnnnnnnnnnnnnnnnnnnnnnnnnnnnnnnnnnnnnnnnnnnnnnnnnnnnnnnnnnnnnnnnnnnnnnnnnnnnnnnnnnnnnnnnnnnnnnnnnnnnnnnnnnnnnnnnnnnnnnnnnnnnnnnnnnnnnnnnnnnnnnnnnnnnnnnnnnnnnnnnnnnnnnnnnnnnnnnnnnnnnnnnnnnnnnnnnnnnnnnnnnnnnnnnnnnnnnnnnnnnnnnnnnnnnnnnnnnnnnnnnnnnnnnnnnnnnnnnnnnnnnnnnnnnnnnnnnnnnnnnnnnnnnnnnnnnnnnnnnnnnnnnnnnnnnnnnnnnnnnnnnnnnnnnnnnnnnnnnnnnnnnnnnnnnnnnnnnnnnnnnnnnnnnnnnnnnnnnnnnnnnnnnnnnnnnnnnnnnnnnnnnnnnnnnnnnnnnnnnnnnnnnnnnnnnnnnnnnnnnnnnnnnnnnnnnnnnnnnnnnnnnnnnnnnnnnnnnnnnnnnnnnnnnnnnnnnnnnnnnnnnnnnnnnnnnnnnnnnnnnnnnnnnnnnnnnnnnnnnnnnnnnnnnnnnnnnnnnnnnnnnnnnnnnnnnnnnnnnnnnnnnnnnnnnnnnnnnnnnnnnnnnnnnnnnnnnnnnnnnnnnnnnnnnnnnnnnnnnnnnnnnnnnnnnnnnnnnnnnnnnnnnnnnnnnnnnnnnnnnnnnnnnnnnnnnnnnnnnnnnnnnnnnnnnnnnnnnnnnnnnnnnnnnnnnnnnnnnnnnnnnnnnnnnnnnnnnnnnnnnnnnnnnnnnnnnnnnnnnnnnnnnnnnnnnnnnnnnnnnnnnnnnnnnnnnnnnnnnnnnnnnnnnnnnnnnnnnnnnnnnnnnnnnnnnnnnnnnnnnnnnnnnnnnnnnnnnnnnnnnnnnnnnnnnnnnnnnnnnnnnnnnnnnnnnnnnnnnnnnnnnnnnnnnnnnnnnnnnnnnnnnnnnnnnnnnnnnnnnnnnnnnnnnnnnnnnnnnnnnnnnnnnnnnnnnnnnnnnnnnnnnnnnnnnnnnnnnnnnnnnnnnnnnnnnnnnnnnnnnnnnnnnnnnnnnnnnnnnnnnnnnnnnnnnnnnnnnnnnnnnnnnnnnnnnnnnnnnnnnnnnnnnnnnnnnnnnnnnnnnnnnnnnnnnnnnnnnnnnnnnnnnnnnnnnnnnnnnnnnnnnnnnnnnnnnnnnnnnnnnnnnnnnnnnnnnnnnnnnnnnnnnnnnnnnnnnnnnnnnnnnnnnnnnnnnnnnnnnnnnnnnnnnnnnnnnnnnnnnnnnnnnnnnnnnnnnnnnnnnnnnnnnnnnnnnnnnnnnnnnnnnnnnnnnnnnnnnnnnnnnnnnnnnnnnnnnnnnnnnnnnnnnnnnnnnnnnnnnnnnnnnnnnnnnnnnnnnnnnnnnnnnnnnnnnnnnnnnnnnnnnnnnnnnnnnnnnnnnnnnnnnnnnnnnnnnnnnnnnnnnnnnnnnnnnnnnnnnnnnnnnnnnnnnnnnnnnnnnnnnnnnnnnnnnnnnnnnnnnnnnnnnnnnnnnnnnnnnnnnnnnnnnnnnnnnnnnnnnnnnnnnnnnnnnnnnnnnnnnnnnnnnnnnnnnnnnnnnnnnnnnnnnnnnnnnnnnnnnnnnnnnnnnnnnnnnnnnnnnnnnnnnnnnnnnnnnnnnnnnnnnnnnnnnnnnnnnnnnnnnnnnnnnnnnnnnnnnnnnnnnnnnnnnnnnnnnnnnnnnnnnnnnnnnnnnnnnnnnnnnnnnnnnnnnnnnnnnnnnnnnnnnnnnnnnnnnnnnnnnnnnnnnnnnnnnnnnnnnnnnnnnnnnnnnnnnnnnnnnnnnnnnnnnnnnnnnnnnnnnnnnnnnnnnnnnnnnnnnnnnnnnnnnnnnnnnnnnnnnnnnnnnnnnnnnnnnnnnnnnnnnnnnnnnnnnnnnnnnnnnnnnnnnnnnnnnnnnnnnnnnnnnnnnnnnnnnnnnnnnnnnnnnnnnnnnnnnnnnnnnnnnnnnnnnnnnnnnnnnnnnnnnnnnnnnnnnnnnnnnnnnnnnnnnnnnnnnnnnnnnnnnnnnnnnnnnnnnnnnnnnnnnnnnnnnnnnnnnnnnnnnnnnnnnnnnnnnnnnnnnnnnnnnnnnnnnnnnnnnnnnnnnnnnnnnnnnnnnnnnnnnnnnnnnnnnnnnnnnnnnnnnnnnnnnnnnnnnnnnnnnnnnnnnnnnnnnnnnnnnnnnnnnnnnnnnnnnnnnnnnnnnnnnnnnnnnnnnnnnnnnnnnnnnnnnnnnnnnnnnnnnnnnnnnnnnnnnnnnnnnnnnnnnnnnnnnnnnnnnnnnnnnnnnnnnnnnnnnnnnnnnnnnnnnnnnnnnnnnnnnnnnnnnnnnnnnnnnnnnnnnnnnnnnnnnnnnnnnnnnnnnnnnnnnnnnnnnnnnnnnnnnnnnnnnnnnnnnnnnnnnnnnnnnnnnnnnnnnnnnnnnnnnnnnnnnnnnnnnnnnnnnnnnnnnnnnnnnnnnnnnnnnnnnnnnnnnnnnnnnnnnnnnnnnnnnnnnnnnnnnnnnnnnnnnnnnnnnnnnnnnnnnnnnnnnnnnnnnnnnnnnnnnnnnnnnnnnnnnnnnnnnnnnnnnnnnnnnnnnnnnnnnnnnnnnnnnnnnnnnnnnnnnnnnnnnnnnnnnnnnnnnnnnnnnnnnnnnnnnnnnnnnnnnnnnnnnnnnnnnnnnnnnnnnnnnnnnnnnnnnnnnnnnnnnnnnnnnnnnnnnnnnnnnnnnnnnnnnnnnnnnnnnnnnnnnnnnnnnnnnnnnnnnnnnnnnnnnnnnnnnnnnnnnnnnnnnnnnnnnnnnnnnnnnnnnnnnnnnnnnnnnnnnnnnnnnnnnnnnnnnnnnnnnnnnnnnnnnnnnnnnnnnnnnnnnnnnnnnnnnnnnnnnnnnnnnnnnnnnnnnnnnnnnnnnnnnnnnnnnnnnnnnnnnnnnnnnnnnnnnnnnnnnnnnnnnnnnnnnnnnnnnnnnnnnnnnnnnnnnnnnnnnnnnnnnnnnnnnnnnnnnnnnnnnnnnnnnnnnnnnnnnnnnnnnnnnnnnnnnnnnnnnnnnnnnnnnnnnnnnnnnnnnnnnnnnnnnnnnnnnnnnnnnnnnnnnnnnnnnnnnnnnnnnnnnnnnnnnnnnnnnnnnnnnnnnnnnnnnnnnnnnnnnnnnnnnnnnnnnnnnnnnnnnnnnnnnnnnnnnnnnnnnnnnnnnnnnnnnnnnnnnnnnnnnnnnnnnnnnnnnnnnnnnnnnnnnnnnnnnnnnnnnnnnnnnnnnnnnnnnnnnnnnnnnnnnnnnnnnnnnnnnnnnnnnnnnnnnnnnnnnnnnnnnnnnnnnnnnnnnnnnnnnnnnnnnnnnnnnnnnnnnnnnnnnnnnnnnnnnnnnnnnnnnnnnnnnnnnnnnnnnnnnnnnnnnnnnnnnnnnnnnnnnnnnnnnnnnnnnnnnnnnnnnnnnnnnnnnnnnnnnnnnnnnnnnnnnnnnnnnnnnnnnnnnnnnnnnnnnnnnnnnnnnnnnnnnnnnnnnnnnnnnnnnnnnnnnnnnnnnnnnnnnnnnnnnnnnnnnnnnnnnnnnnnnnnnnnnnnnnnnnnnnnnnnnnnnnnnnnnnnnnnnnnnnnnnnnnnnnnnnnnnnnnnnnnnnnnnnnnnnnnnnnnnnnnnnnnnnnnnnnnnnnnnnnnnnnnnnnnnnnnnnnnnnnnnnnnnnnnnnnnnnnnnnnnnnnnnnnnnnnnnnnnnnnnnnnnnnnnnnnnnnnnnnnnnnnnnnnnnnnnnnnnnnnnnnnnnnnnnnnnnnnnnnnnnnnnnnnnnnnnnnnnnnnnnnnnnnnnnnnnnnnnnnnnnnnnnnnnnnnnnnnnnnnnnnnnnnnnnnnnnnnnnnnnnnnnnnnnnnnnnnnnnnnnnnnnnnnnnnnnnnnnnnnnnnnnnnnnnnnnnnnnnnnnnnnnnnnnnnnnnnnnnnnnnnnnnnnnnnnnnnnnnnnnnnnnnnnnnnnnnnnnnnnnnnnnnnnnnnnnnnnnnnnnnnnnnnnnnnnnnnnnnnnnnnnnnnnnnnnnnnnnnnnnnnnnnnnnnnnnnnnnnnnnnnnnnnnnnnnnnnnnnnnnnnnnnnnnnnnnnnnnnnnnnnnnnnnnnnnnnnnnnnnnnnnnnnnnnnnnnnnnnnnnnnnnnnnnnnnnnnnnnnnnnnnnnnnnnnnnnnnnnnnnnnnnnnnnnnnnnnnnnnnnnnnnnnnnnnnnnnnnnnnnnnnnnnnnnnnnnnnnnnnnnnnnnnnnnnnnnnnnnnnnnnnnnnnnnnnnnnnnnnnnnnnnnnnnnnnnnnnnnnnnnnnnnnnnnnnnnnnnnnnnnnnnnnnnnnnnnnnnnnnnnnnnnnnnnnnnnnnnnnnnnnnnnnnnnnnnnnnnnnnnnnnnnnnnnnnnnnnnnnnnnnnnnnnnnnnnnnnnnnnnnnnnnnnnnnnnnnnnnnnnnnnnnnnnnnnnnnnnnnnnnnnnnnnnnnnnnnnnnnnnnnnnnnnnnnnnnnnnnnnnnnnnnnnnnnnnnnnnnnnnnnnnnnnnnnnnnnnnnnnnnnnnnnnnnnnnnnnnnnnnnnnnnnnnnnnnnnnnnnnnnnnnnnnnnnnnnnnnnnnnnnnnnnnnnnnnnnnnnnnnnnnnnnnnnnnnnnnnnnnnnnnnnnnnnnnnnnnnnnnnnnnnnnnnnnnnnnnnnnnnnnnnnnnnnnnnnnnnnnnnnnnnnnnnnnnnnnnnnnnnnnnnnnnnnnnnnnnnnnnnnnnnnnnnnnnnnnnnnnnnnnnnnnnnnnnnnnnnnnnnnnnnnnnnnnnnnnnnnnnnnnnnnnnnnnnnnnnnnnnnnnnnnnnnnnnnnnnnnnnnnnnnnnnnnnnnnnnnnnnnnnnnnnnnnnnnnnnnnnnnnnnnnnnnnnnnnnnnnnnnnnnnnnnnnnnnnnnnnnnnnnnnnnnnnnnnnnnnnnnnnnnnnnnnnnnnnnnnnnnnnnnnnnnnnnnnnnnnnnnnnnnnnnnnnnnnnnnnnnnnnnnnnnnnnnnnnnnnnnnnnnnnnnnnnnnnnnnnnnnnnnnnnnnnnnnnnnnnnnnnnnnnnnnnnnnnnnnnnnnnnnnnnnnnnnnnnnnnnnnnnnnnnnnnnnnnnnnnnnnnnnnnnnnnnnnnnnnnnnnnnnnnnnnnnnnnnnnnnnnnnnnnnnnnnnnnnnnnnnnnnnnnnnnnnnnnnnnnnnnnnnnnnnnnnnnnnnnnnnnnnnnnnnnnnnnnnnnnnnnnnnnnnnnnnnnnnnnnnnnnnnnnnnnnnnnnnnnnnnnnnnnnnnnnnnnnnnnnnnnnnnnnnnnnnnnnnnnnnnnnnnnnnnnnnnnnnnnnnnnnnnnnnnnnnnnnnnnnnnnnnnnnnnnnnnnnnnnnnnnnnnnnnnnnnnnnnnnnnnnnnnnnnnnnnnnnnnnnnnnnnnnnnnnnnnnnnnnnnnnnnnnnnnnnnnnnnnnnnnnnnnnnnnnnnnnnnnnnnnnnnnnnnnnnnnnnnnnnnnnnnnnnnnnnnnnnnnnnnnnnnnnnnnnnnnnnnnnnnnnnnnnnnnnnnnnnnnnnnnnnnnnnnnnnnnnnnnnnnnnnnnnnnnnnnnnnnnnnnnnnnnnnnnnnnnnnnnnnnnnnnnnnnnnnnnnnnnnnnnnnnnnnnnnnnnnnnnnnnnnnnnnnnnnnnnnnnnnnnnnnnnnnnnnnnnnnnnnnnnnnnnnnnnnnnnnnnnnnnnnnnnnnnnnnnnnnnnnnnnnnnnnnnnnnnnnnnnnnnnnnnnnnnnnnnnnnnnnnnnnnnnnnnnnnnnnnnnnnnnnnnnnnnnnnnnnnnnnnnnnnnnnnnnnnnnnnnnnnnnnnnnnnnnnnnnnnnnnnnnnnnnnnnnnnnnnnnnnnnnnnnnnnnnnnnnnnnnnnnnnnnnnnnnnnnnnnnnnnnnnnnnnnnnnnnnnnnnnnnnnnnnnnnnnnnnnnnnnnnnnnnnnnnnnnnnnnnnnnnnnnnnnnnnnnnnnnnnnnnnnnnnnnnnnnnnnnnnnnnnnnnnnnnnnnnnnnnnnnnnnnnnnnnnnnnnnnnnnnnnnnnnnnnnnnnnnnnnnnnnnnnnnnnnnnnnnnnnnnnnnnnnnnnnnnnnnnnnnnnnnnnnnnnnnnnnnnnnnnnnnnnnnnnnnnnnnnnnnnnnnnnnnnnnnnnnnnnnnnnnnnnnnnnnnnnnnnnnnnnnnnnnnnnnnnnnnnnnnnnnnnnnnnnnnnnnnnnnnnnnnnnnnnnnnnnnnnnnnnnnnnnnnnnnnnnnnnnnnnnnnnnnnnnnnnnnnnnnnnnnnnnnnnnnnnnnnnnnnnnnnnnnnnnnnnnnnnnnnnnnnnnnnnnnnnnnnnnnnnnnnnnnnnnnnnnnnnnnnnnnnnnnnnnnnnnnnnnnnnnnnnnnnnnnnnnnnnnnnnnnnnnnnnnnnnnnnnnnnnnnnnnnnnnnnnnnnnnnnnnnnnnnnnnnnnnnnnnnnnnnnnnnnnnnnnnnnnnnnnnnnnnnnnnnnnnnnnnnnnnnnnnnnnnnnnnnnnnnnnnnnnnnnnnnnnnnnnnnnnnnnnnnnnnnnnnnnnnnnnnnnnnnnnnnnnnnnnnnnnnnnnnnnnnnnnnnnnnnnnnnnnnnnnnnnnnnnnnnnnnnnnnnnnnnnnnnnnnnnnnnnnnnnnnnnnnnnnnnnnnnnnnnnnnnnnnnnnnnnnnnnnnnnnnnnnnnnnnnnnnnnnnnnnnnnnnnnnnnnnnnnnnnnnnnnnnnnnnnnnnnnnnnnnnnnnnnnnnnnnnnnnnnnnnnnnnnnnnnnnnnnnnnnnnnnnnnnnnnnnnnnnnnnnnnnnnnnnnnnnnnnnnnnnnnnnnnnnnnnnnnnnnnnnnnnnnnnnnnnnnnnnnnnnnnnnnnnnnnnnnnnnnnnnnnnnnnnnnnnnnnnnnnnnnnnnnnnnnnnnnnnnnnnnnnnnnnnnnnnnnnnnnnnnnnnnnnnnnnnnnnnnnnnnnnnnnnnnnnnnnnnnnnnnnnnnnnnnnnnnnnnnnnnnnnnnnnnnnnnnnnnnnnnnnnnnnnnnnnnnnnnnnnnnnnnnnnnnnnnnnnnnnnnnnnnnnnnnnnnnnnnnnnnnnnnnnnnnnnnnnnnnnnnnnnnnnnnnnnnnnnnnnnnnnnnnnnnnnnnnnnnnnnnnnnnnnnnnnnnnnnnnnnnnnnnnnnnnnnnnnnnnnnnnnnnnnnnnnnnnnnnnnnnnnnnnnnnnnnnnnnnnnnnnnnnnnnnnnnnnnnnnnnnnnnnnnnnnnnnnnnnnnnnnnnnnnnnnnnnnnnnnnnnnnnnnnnnnnnnnnnnnnnnnnnnnnnnnnnnnnnnnnnnnnnnnnnnnnnnnnnnnnnnnnnnnnnnnnnnnnnnnnnnnnnnnnnnnnnnnnnnnnnnnnnnnnnnnnnnnnnnnnnnnnnnnnnnnnnnnnnnnnnnnnnnnnnnnnnnnnnnnnnnnnnnnnnnnnnnnnnnnnnnnnnnnnnnnnnnnnnnnnnnnnnnnnnnnnnnnnnnnnnnnnnnnnnnnnnnnnnnnnnnnnnnnnnnnnnnnnnnnnnnnnnnnnnnnnnnnnnnnnnnnnnnnnnnnnnnnnnnnnnnnnnnnnnnnnnnnnnnnnnnnnnnnnnnnnnnnnnnnnnnnnnnnnnnnnnnnnnnnnnnnnnnnnnnnnnnnnnnnnnnnnnnnnnnnnnnnnnnnnnnnnnnnnnnnnnnnnnnnnnnnnnnnnnnnnnnnnnnnnnnnnnnnnnnnnnnnnnnnnnnnnnnnnnnnnnnnnnnnnnnnnnnnnnnnnnnnnnnnnnnnnnnnnnnnnnnnnnnnnnnnnnnnnnnnnnnnnnnnnnnnnnnnnnnnnnnnnnnnnnnnnnnnnnnnnnnnnnnnnnnnnnnnnnnnnnnnnnnnnnnnnnnnnnnnnnnnnnnnnnnnnnnnnnnnnnnnnnnnnnnnnnnnnnnnnnnnnnnnnnnnnnnnnnnnnnnnnnnnnnnnnnnnnnnnnnnnnnnnnnnnnnnnnnnnnnnnnnnnnnnnnnnnnnnnnnnnnnnnnnnnnnnnnnnnnnnnnnnnnnnnnnnnnnnnnnnnnnnnnnnnnnnnnnnnnnnnnnnnnnnnnnnnnnnnnnnnnnnnnnnnnnnnnnnnnnnnnnnnnnnnnnnnnnnnnnnnnnnnnnnnnnnnnnnnnnnnnnnnnnnnnnnnnnnnnnnnnnnnnnnnnnnnnnnnnnnnnnnnnnnnnnnnnnnnnnnnnnnnnnnnnnnnnnnnnnnnnnnnnnnnnnnnnnnnnnnnnnnnnnnnnnnnnnnnnnnnnnnnnnnnnnnnnnnnnnnnnnnnnnnnnnnnnnnnnnnnnnnnnnnnnnnnnnnnnnnnnnnnnnnnnnnnnnnnnnnnnnnnnnnnnnnnnnnnnnnnnnnnnnnnnnnnnnnnnnnnnnnnnnnnnnnnnnnnnnnnnnnnnnnnnnnnnnnnnnnnnnnnnnnnnnnnnnnnnnnnnnnnnnnnnnnnnnnnnnnnnnnnnnnnnnnnnnnnnnnnnnnnnnnnnnnnnnnnnnnnnnnnnnnnnnnnnnnnnnnnnnnnnnnnnnnnnnnnnnnnnnnnnnnnnnnnnnnnnnnnnnnnnnnnnnnnnnnnnnnnnnnnnnnnnnnnnnnnnnnnnnnnnnnnnnnnnnnnnnnnnnnnnnnnnnnnnnnnnnnnnnnnnnnnnnnnnnnnnnnnnnnnnnnnnnnnnnnnnnnnnnnnnnnnnnnnnnnnnnnnnnnnnnnnnnnnnnnnnnnnnnnnnnnnnnnnnnnnnnnnnnnnnnnnnnnnnnnnnnnnnnnnnnnnnnnnnnnnnnnnnnnnnnnnnnnnnnnnnnnnnnnnnnnnnnnnnnnnnnnnnnnnnnnnnnnnnnnnnnnnnnnnnnnnnnnnnnnnnnnnnnnnnnnnnnnnnnnnnnnnnnnnnnnnnnnnnnnnnnnnnnnnnnnnnnnnnnnnnnnnnnnnnnnnnnnnnnnnnnnnnnnnnnnnnnnnnnnnnnnnnnnnnnnnnnnnnnnnnnnnnnnnnnnnnnnnnnnnnnnnnnnnnnnnnnnnnnnnnnnnnnnnnnnnnnnnnnnnnnnnnnnnnnnnnnnnnnnnnnnnnnnnnnnnnnnnnnnnnnnnnnnnnnnnnnnnnnnnnnnnnnnnnnnnnnnnnnnnnnnnnnnnnnnnnnnnnnnnnnnnnnnnnnnnnnnnnnnnnnnnnnnnnnnnnnnnnnnnnnnnnnnnnnnnnnnnnnnnnnnnnnnnnnnnnnnnnnnnnnnnnnnnnnnnnnnnnnnnnnnnnnnnnnnnnnnnnnnnnnnnnnnnnnnnnnnnnnnnnnnnnnnnnnnnnnnnnnnnnnnnnnnnnnnnnnnnnnnnnnnnnnnnnnnnnnnnnnnnnnnnnnnnnnnnnnnnnnnnnnnnnnnnnnnnnnnnnnnnnnnnnnnnnnnnnnnnnnnnnnnnnnnnnnnnnnnnnnnnnnnnnnnnnnnnnnnnnnnnnnnnnnnnnnnnnnnnnnnnnnnnnnnnnnnnnnnnnnnnnnnnnnnnnnnnnnnnnnnnnnnnnnnnnnnnnnnnnnnnnnnnnnnnnnnnnnnnnnnnnnnnnnnnnnnnnnnnnnnnnnnnnnnnnnnnnnnnnnnnnnnnnnnnnnnnnnnnnnnnnnnnnnnnnnnnnnnnnnnnnnnnnnnnnnnnnnnnnnnnnnnnnnnnnnnnnnnnnnnnnnnnnnnnnnnnnnnnnnnnnnnnnnnnnnnnnnnnnnnnnnnnnnnnnnnnnnnnnnnnnnnnnnnnnnnnnnnnnnnnnnnnnnnnnnnnnnnnnnnnnnnnnnnnnnnnnnnnnnnnnnnnnnnnnnnnnnnnnnnnnnnnnnnnnnnnnnnnnnnnnnnnnnnnnnnnnnnnnnnnnnnnnnnnnnnnnnnnnnnnnnnnnnnnnnnnnnnnnnnnnnnnnnnnnnnnnnnnnnnnnnnnnnnnnnnnnnnnnnnnnnnnnnnnnnnnnnnnnnnnnnnnnnnnnnnnnnnnnnnnnnnnnnnnnnnnnnnnnnnnnnnnnnnnnnnnnnnnnnnnnnnnnnnnnnnnnnnnnnnnnnnnnnnnnnnnnnnnnnnnnnnnnnnnnnnnnnnnnnnnnnnnnnnnnnnnnnnnnnnnnnnnnnnnnnnnnnnnnnnnnnnnnnnnnnnnnnnnnnnnnnnnnnnnnnnnnnnnnnnnnnnnnnnnnnnnnnnnnnnnnnnnnnnnnnnnnnnnnnnnnnnnnnnnnnnnnnnnnnnnnnnnnnnnnnnnnnnnnnnnnnnnnnnnnnnnnnnnnnnnnnnnnnnnnnnnnnnnnnnnnnnnnnnnnnnnnnnnnnnnnnnnnnnnnnnnnnnnnnnnnnnnnnnnnnnnnnnnnnnnnnnnnnnnnnnnnnnnnnnnnnnnnnnnnnnnnnnnnnnnnnnnnnnnnnnnnnnnnnnnnnnnnnnnnnnnnnnnnnnnnnnnnnnnnnnnnnnnnnnnnnnnnnnnnnnnnnnnnnnnnnnnnnnnnnnnnnnnnnnnnnnnnnnnnnnnnnnnnnnnnnnnnnnnnnnnnnnnnnnnnnnnnnnnnnnnnnnnnnnnnnnnnnnnnnnnnnnnnnnnnnnnnnnnnnnnnnnnnnnnnnnnnnnnnnnnnnnnnnnnnnnnnnnnnnnnnnnnnnnnnnnnnnnnnnnnnnnnnnnnnnnnnnnnnnnnnnnnnnnnnnnnnnnnnnnnnnnnnnnnnnnnnnnnnnnnnnnnnnnnnnnnnnnnnnnnnnnnnnnnnnnnnnnnnnnnnnnnnnnnnnnnnnnnnnnnnnnnnnnnnnnnnnnnnnnnnnnnnnnnnnnnnnnnnnnnnnnnnnnnnnnnnnnnnnnnnnnnnnnnnnnnnnnnnnnnnnnnnnnnnnnnnnnnnnnnnnnnnnnnnnnnnnnnnnnnnnnnnnnnnnnnnnnnnnnnnnnnnnnnnnnnnnnnnnnnnnnnnnnnnnnnnnnnnnnnnnnnnnnnnnnnnnnnnnnnnnnnnnnnnnnnnnnnnnnnnnnnnnnnnnnnnnnnnnnnnnnnnnnnnnnnnnnnnnnnnnnnnnnnnnnnnnnnnnnnnnnnnnnnnnnnnnnnnnnnnnnnnnnnnnnnnnnnnnnnnnnnnnnnnnnnnnnnnnnnnnnnnnnnnnnnnnnnnnnnnnnnnnnnnnnnnnnnnnnnnnnnnnnnnnnnnnnnnnnnnnnnnnnnnnnnnnnnnnnnnnnnnnnnnnnnnnnnnnnnnnnnnnnnnnnnnnnnnnnnnnnnnnnnnnnnnnnnnnnnnnnnnnnnnnnnnnnnnnnnnnnnnnnnnnnnnnnnnnnnnnnnnnnnnnnnnnnnnnnnnnnnnnnnnnnnnnnnnnnnnnnnnnnnnnnnnnnnnnnnnnnnnnnnnnnnnnnnnnnnnnnnnnnnnnnnnnnnnnnnnnnnnnnnnnnnnnnnnnnnnnnnnnnnnnnnnnnnnnnnnnnnnnnnnnnnnnnnnnnnnnnnnnnnnnnnnnnnnnnnnnnnnnnnnnnnnnnnnnnnnnnnnnnnnnnnnnnnnnnnnnnnnnnnnnnnnnnnnnnnnnnnnnnnnnnnnnnnnnnnnnnnnnnnnnnnnnnnnnnnnnnnnnnnnnnnnnnnnnnnnnnnnnnnnnnnnnnnnnnnnnnnnnnnnnnnnnnnnnnnnnnnnnnnnnnnnnnnnnnnnnnnnnnnnnnnnnnnnnnnnnnnnnnnnnnnnnnnnnnnnnnnnnnnnnnnnnnnnnnnnnnnnnnnnnnnnnnnnnnnnnnnnnnnnnnnnnnnnnnnnnnnnnnnnnnnnnnnnnnnnnnnnnnnnnnnnnnnnnnnnnnnnnnnnnnnnnnnnnnnnnnnnnnnnnnnnnnnnnnnnnnnnnnnnnnnnnnnnnnnnnnnnnnnnnnnnnnnnnnnnnnnnnnnnnnnnnnnnnnnnnnnnnnnnnnnnnnnnnnnnnnnnnnnnnnnnnnnnnnnnnnnnnnnnnnnnnnnnnnnnnnnnnnnnnnnnnnnnnnnnnnnnnnnnnnnnnnnnnnnnnnnnnnnnnnnnnnnnnnnnnnnnnnnnnnnnnnnnnnnnnnnnnnnnnnnnnnnnnnnnnnnnnnnnnnnnnnnnnnnnnnnnnnnnnnnnnnnnnnnnnnnnnnnnnnnnnnnnnnnnnnnnnnnnnnnnnnnnnnnnnnnnnnnnnnnnnnnnnnnnnnnnnnnnnnnnnnnnnnnnnnnnnnnnnnnnnnnnnnnnnnnnnnnnnnnnnnnnnnnnnnnnnnnnnnnnnnnnnnnnnnnnnnnnnnnnnnnnnnnnnnnnnnnnnnnnnnnnnnnnnnnnnnnnnnnnnnnnnnnnnnnnnnnnnnnnnnnnnnnnnnnnnnnnnnnnnnnnnnnnnnnnnnnnnnnnnnnnnnnnnnnnnnnnnnnnnnnnnnnnnnnnnnnnnnnnnnnnnnnnnnnnnnnnnnnnnnnnnnnnnnnnnnnnnnnnnnnnnnnnnnnnnnnnnnnnnnnnnnnnnnnnnnnnnnnnnnnnnnnnnnnnnnnnnnnnnnnnnnnnnnnnnnnnnnnnnnnnnnnnnnnnnnnnnnnnnnnnnnnnnnnnnnnnnnnnnnnnnnnnnnnnnnnnnnnnnnnnnnnnnnnnnnnnnnnnnnnnnnnnnnnnnnnnnnnnnnnnnnnnnnnnnnnnnnnnnnnnnnnnnnnnnnnnnnnnnnnnnnnnnnnnnnnnnnnnnnnnnnnnnnnnnnnnnnnnnnnnnnnnnnnnnnnnnnnnnnnnnnnnnnnnnnnnnnnnnnnnnnnnnnnnnnnnnnnnnnnnnnnnnnnnnnnnnnnnnnnnnnnnnnnnnnnnnnnnnnnnnnnnnnnnnnnnnnnnnnnnnnnnnnnnnnnnnnnnnnnnnnnnnnnnnnnnnnnnnnnnnnnnnnnnnnnnnnnnnnnnnnnnnnnnnnnnnnnnnnnnnnnnnnnnnnnnnnnnnnnnnnnnnnnnnnnnnnnnnnnnnnnnnnnnnnnnnnnnnnnnnnnnnnnnnnnnnnnnnnnnnnnnnnnnnnnnnnnnnnnnnnnnnnnnnnnnnnnnnnnnnnnnnnnnnnnnnnnnnnnnnnnnnnnnnnnnnnnnnnnnnnnnnnnnnnnnnnnnnnnnnnnnnnnnnnnnnnnnnnnnnnnnnnnnnnnnnnnnnnnnnnnnnnnnnnnnnnnnnnnnnnnnnnnnnnnnnnnnnnnnnnnnnnnnnnnnnnnnnnnnnnnnnnnnnnnnnnnnnnnnnnnnnnnnnnnnnnnnnnnnnnnnnnnnnnnnnnnnnnnnnnnnnnnnnnnnnnnnnnnnnnnnnnnnnnnnnnnnnnnnnnnnnnnnnnnnnnnnnnnnnnnnnnnnnnnnnnnnnnnnnnnnnnnnnnnnnnnnnnnnnnnnnnnnnnnnnnnnnnnnnnnnnnnnnnnnnnnnnnnnnnnnnnnnnnnnnnnnnnnnnnnnnnnnnnnnnnnnnnnnnnnnnnnnnnnnnnnnnnnnnnnnnnnnnnnnnnnnnnnnnnnnnnnnnnnnnnnnnnnnnnnnnnnnnnnnnnnnnnnnnnnnnnnnnnnnnnnnnnnnnnnnnnnnnnnnnnnnnnnnnnnnnnnnnnnnnnnnnnnnnnnnnnnnnnnnnnnnnnnnnnnnnnnnnnnnnnnnnnnnnnnnnnnnnnnnnnnnnnnnnnnnnnnnnnnnnnnnnnnnnnnnnnnnnnnnnnnnnnnnnnnnnnnnnnnnnnnnnnnnnnnnnnnnnnnnnnnnnnnnnnnnnnnnnnnnnnnnnnnnnnnnnnnnnnnnnnnnnnnnnnnnnnnnnnnnnnnnnnnnnnnnnnnnnnnnnnnnnnnnnnnnnnnnnnnnnnnnnnnnnnnnnnnnnnnnnnnnnnnnnnnnnnnnnnnnnnnnnnnnnnnnnnnnnnnnnnnnnnnnnnnnnnnnnnnnnnnnnnnnnnnnnnnnnnnnnnnnnnnnnnnnnnnnnnnnnnnnnnnnnnnnnnnnnnnnnnnnnnnnnnnnnnnnnnnnnnnnnnnnnnnnnnnnnnnnnnnnnnnnnnnnnnnnnnnnnnnnnnnnnnnnnnnnnnnnnnnnnnnnnnnnnnnnnnnnnnnnnnnnnnnnnnnnnnnnnnnnnnnnnnnnnnnnnnnnnnnnnnnnnnnnnnnnnnnnnnnnnnnnnnnnnnnnnnnnnnnnnnnnnnnnnnnnnnnnnnnnnnnnnnnnnnnnnnnnnnnnnnnnnnnnnnnnnnnnnnnnnnnnnnnnnnnnnnnnnnnnnnnnnnnnnnnnnnnnnnnnnnnnnnnnnnnnnnnnnnnnnnnnnnnnnnnnnnnnnnnnnnnnnnnnnnnnnnnnnnnnnnnnnnnnnnnnnnnnnnnnnnnnnnnnnnnnnnnnnnnnnnnnnnnnnnnnnnnnnnnnnnnnnnnnnnnnnnnnnnnnnnnnnnnnnnnnnnnnnnnnnnnnnnnnnnnnnnnnnnnnnnnnnnnnnnnnnnnnnnnnnnnnnnnnnnnnnnnnnnnnnnnnnnnnnnnnnnnnnnnnnnnnnnnnnnnnnnnnnnnnnnnnnnnnnnnnnnnnnnnnnnnnnnnnnnnnnnnnnnnnnnnnnnnnnnnnnnnnnnnnnnnnnnnnnnnnnnnnnnnnnnnnnnnnnnnnnnnnnnnnnnnnnnnnnnnnnnnnnnnnnnnnnnnnnnnnnnnnnnnnnnnnnnnnnnnnnnnnnnnnnnnnnnnnnnnnnnnnnnnnnnnnnnnnnnnnnnnnnnnnnnnnnnnnnnnnnnnnnnnnnnnnnnnnnnnnnnnnnnnnnnnnnnnnnnnnnnnnnnnnnnnnnnnnnnnnnnnnnnnnnnnnnnnnnnnnnnnnnnnnnnnnnnnnnnnnnnnnnnnnnnnnnnnnnnnnnnnnnnnnnnnnnnnnnnnnnnnnnnnnnnnnnnnnnnnnnnnnnnnnnnnnnnnnnnnnnnnnnnnnnnnnnnnnnnnnnnnnnnnnnnnnnnnnnnnnnnnnnnnnnnnnnnnnnnnnnnnnnnnnnnnnnnnnnnnnnnnnnnnnnnnnnnnnnnnnnnnnnnnnnnnnnnnnnnnnnnnnnnnnnnnnnnnnnnnnnnnnnnnnnnnnnnnnnnnnnnnnnnnnnnnnnnnnnnnnnnnnnnnnnnnnnnnnnnnnnnnnnnnnnnnnnnnnnnnnnnnnnnnnnnnnnnnnnnnnnnnnnnnnnnnnnnnnnnnnnnnnnnnnnnnnnnnnnnnnnnnnnnnnnnnnnnnnnnnnnnnnnnnnnnnnnnnnnnnnnnnnnnnnnnnnnnnnnnnnnnnnnnnnnnnnnnnnnnnnnnnnnnnnnnnnnnnnnnnnnnnnnnnnnnnnnnnnnnnnnnnnnnnnnnnnnnnnnnnnnnnnnnnnnnnnnnnnnnnnnnnnnnnnnnnnnnnnnnnnnnnnnnnnnnnnnnnnnnnnnnnnnnnnnnnnnnnnnnnnnnnnnnnnnnnnnnnnnnnnnnnnnnnnnnnnnnnnnnnnnnnnnnnnnnnnnnnnnnnnnnnnnnnnnnnnnnnnnnnnnnnnnnnnnnnnnnnnnnnnnnnnnnnnnnnnnnnnnnnnnnnnnnnnnnnnnnnnnnnnnnnnnnnnnnnnnnnnnnnnnnnnnnnnnnnnnnnnnnnnnnnnnnnnnnnnnnnnnnnnnnnnnnnnnnnnnnnnnnnnnnnnnnnnnnnnnnnnnnnnnnnnnnnnnnnnnnnnnnnnnnnnnnnnnnnnnnnnnnnnnnnnnnnnnnnnnnnnnnnnnnnnnnnnnnnnnnnnnnnnnnnnnnnnnnnnnnnnnnnnnnnnnnnnnnnnnnnnnnnnnnnnnnnnnnnnnnnnnnnnnnnnnnnnnnnnnnnnnnnnnnnnnnnnnnnnnnnnnnnnnnnnnnnnnnnnnnnnnnnnnnnnnnnnnnnnnnnnnnnnnnnnnnnnnnnnnnnnnnnnnnnnnnnnnnnnnnnnnnnnnnnnnnnnnnnnnnnnnnnnnnnnnnnnnnnnnnnnnnnnnnnnnnnnnnnnnnnnnnnnnnnnnnnnnnnnnnnnnnnnnnnnnnnnnnnnnnnnnnnnnnnnnnnnnnnnnnnnnnnnnnnnnnnnnnnnnnnnnnnnnnnnnnnnnnnnnnnnnnnnnnnnnnnnnnnnnnnnnnnnnnnnnnnnnnnnnnnnnnnnnnnnnnnnnnnnnnnnnnnnnnnnnnnnnnnnnnnnnnnnnnnnnnnnnnnnnnnnnnnnnnnnnnnnnnnnnnnnnnnnnnnnnnnnnnnnnnnnnnnnnnnnnnnnnnnnnnnnnnnnnnnnnnnnnnnnnnnnnnnnnnnnnnnnnnnnnnnnnnnnnnnnnnnnnnnnnnnnnnnnnnnnnnnnnnnnnnnnnnnnnnnnnnnnnnnnnnnnnnnnnnnnnnnnnnnnnnnnnnnnnnnnnnnnnnnnnnnnnnnnnnnnnnnnnnnnnnnnnnnnnnnnnnnnnnnnnnnnnnnnnnnnnnnnnnnnnnnnnnnnnnnnnnnnnnnnnnnnnnnnnnnnnnnnnnnnnnnnnnnnnnnnnnnnnnnnnnnnnnnnnnnnnnnnnnnnnnnnnnnnnnnnnnnnnnnnnnnnnnnnnnnnnnnnnnnnnnnnnnnnnnnnnnnnnnnnnnnnnnnnnnnnnnnnnnnnnnnnnnnnnnnnnnnnnnnnnnnnnnnnnnnnnnnnnnnnnnnnnnnnnnnnnnnnnnnnnnnnnnnnnnnnnnnnnnnnnnnnnnnnnnnnnnnnnnnnnnnnnnnnnnnnnnnnnnnnnnnnnnnnnnnnnnnnnnnnnnnnnnnnnnnnnnnnnnnnnnnnnnnnnnnnnnnnnnnnnnnnnnnnnnnnnnnnnnnnnnnnnnnnnnnnnnnnnnnnnnnnnnnnnnnnnnnnnnnnnnnnnnnnnnnnnnnnnnnnnnnnnnnnnnnnnnnnnnnnnnnnnnnnnnnnnnnnnnnnnnnnnnnnnnnnnnnnnnnnnnnnnnnnnnnnnnnnnnnnnnnnnnnnnnnnnnnnnnnnnnnnnnnnnnnnnnnnnnnnnnnnnnnnnnnnnnnnnnnnnnnnnnnnnnnnnnnnnnnnnnnnnnnnnnnnnnnnnnnnnnnnnnnnnnnnnnnnnnnnnnnnnnnnnnnnnnnnnnnnnnnnnnnnnnnnnnnnnnnnnnnnnnnnnnnnnnnnnnnnnnnnnnnnnnnnnnnnnnnnnnnnnnnnnnnnnnnnnnnnnnnnnnnnnnnnnnnnnnnnnnnnnnnnnnnnnnnnnnnnnnnnnnnnnnnnnnnnnnnnnnnnnnnnnnnnnnnnnnnnnnnnnnnnnnnnnnnnnnnnnnnnnnnnnnnnnnnnnnnnnnnnnnnnnnnnnnnnnnnnnnnnnnnnnnnnnnnnnnnnnnnnnnnnnnnnnnnnnnnnnnnnnnnnnnnnnnnnnnnnnnnnnnnnnnnnnnnnnnnnnnnnnnnnnnnnnnnnnnnnnnnnnnnnnnnnnnnnnnnnnnnnnnnnnnnnnnnnnnnnnnnnnnnnnnnnnnnnnnnnnnnnnnnnnnnnnnnnnnnnnnnnnnnnnnnnnnnnnnnnnnnnnnnnnnnnnnnnnnnnnnnnnnnnnnnnnnnnnnnnnnnnnnnnnnnnnnnnnnnnnnnnnnnnnnnnnnnnnnnnnnnnnnnnnnnnnnnnnnnnnnnnnnnnnnnnnnnnnnnnnnnnnnnnnnnnnnnnnnnnnnnnnnnnnnnnnnnnnnnnnnnnnnnnnnnnnnnnnnnnnnnnnnnnnnnnnnnnnnnnnnnnnnnnnnnnnnnnnnnnnnnnnnnnnnnnnnnnnnnnnnnnnnnnnnnnnnnnnnnnnnnnnnnnnnnnnnnnnnnnnnnnnnnnnnnnnnnnnnnnnnnnnnnnnnnnnnnnnnnnnnnnnnnnnnnnnnnnnnnnnnnnnnnnnnnnnnnnnnnnnnnnnnnnnnnnnnnnnnnnnnnnnnnnnnnnnnnnnnnnnnnnnnnnnnnnnnnnnnnnnnnnnnnnnnnnnnnnnnnnnnnnnnnnnnnnnnnnnnnnnnnnnnnnnnnnnnnnnnnnnnnnnnnnnnnnnnnnnnnnnnnnnnnnnnnnnnnnnnnnnnnnnnnnnnnnnnnnnnnnnnnnnnnnnnnnnnnnnnnnnnnnnnnnnnnnnnnnnnnnnnnnnnnnnnnnnnnnnnnnnnnnnnnnnnnnnnnnnnnnnnnnnnnnnnnnnnnnnnnnnnnnnnnnnnnnnnnnnnnnnnnnnnnnnnnnnnnnnnnnnnnnnnnnnnnnnnnnnnnnnnnnnnnnnnnnnnnnnnnnnnnnnnnnnnnnnnnnnnnnnnnnnnnnnnnnnnnnnnnnnnnnnnnnnnnnnnnnnnnnnnnnnnnnnnnnnnnnnnnnnnnnnnnnnnnnnnnnnnnnnnnnnnnnnnnnnnnnnnnnnnnnnnnnnnnnnnnnnnnnnnnnnnnnnnnnnnnnnnnnnnnnnnnnnnnnnnnnnnnnnnnnnnnnnnnnnnnnnnnnnnnnnnnnnnnnnnnnnnnnnnnnnnnnnnnnnnnnnnnnnnnnnnnnnnnnnnnnnnnnnnnnnnnnnnnnnnnnnnnnnnnnnnnnnnnnnnnnnnnnnnnnnnnnnnnnnnnnnnnnnnnnnnnnnnnnnnnnnnnnnnnnnnnnnnnnnnnnnnnnnnnnnnnnnnnnnnnnnnnnnnnnnnnnnnnnnnnnnnnnnnnnnnnnnnnnnnnnnnnnnnnnnnnnnnnnnnnnnnnnnnnnnnnnnnnnnnnnnnnnnnnnnnnnnnnnnnnnnnnnnnnnnnnnnnnnnnnnnnnnnnnnnnnnnnnnnnnnnnnnnnnnnnnnnnnnnnnnnnnnnnnnnnnnnnnnnnnnnnnnnnnnnnnnnnnnnnnnnnnnnnnnnnnnnnnnnnnnnnnnnnnnnnnnnnnnnnnnnnnnnnnnnnnnnnnnnnnnnnnnnnnnnnnnnnnnnnnnnnnnnnnnnnnnnnnnnnnnnnnnnnnnnnnnnnnnnnnnnnnnnnnnnnnnnnnnnnnnnnnnnnnnnnnnnnnnnnnnnnnnnnnnnnnnnnnnnnnnnnnnnnnnnnnnnnnnnnnnnnnnnnnnnnnnnnnnnnnnnnnnnnnnnnnnnnnnnnnnnnnnnnnnnnnnnnnnnnnnnnnnnnnnnnnnnnnnnnnnnnnnnnnnnnnnnnnnnnnnnnnnnnnnnnnnnnnnnnnnnnnnnnnnnnnnnnnnnnnnnnnnnnnnnnnnnnnnnnnnnnnnnnnnnnnnnnnnnnnnnnnnnnnnnnnnnnnnnnnnnnnnnnnnnnnnnnnnnnnnnnnnnnnnnnnnnnnnnnnnnnnnnnnnnnnnnnnnnnnnnnnnnnnnnnnnnnnnnnnnnnnnnnnnnnnnnnnnnnnnnnnnnnnnnnnnnnnnnnnnnnnnnnnnnnnnnnnnnnnnnnnnnnnnnnnnnnnnnnnnnnnnnnnnnnnnnnnnnnnnnnnnnnnnnnnnnnnnnnnnnnnnnnnnnnnnnnnnnnnnnnnnnnnnnnnnnnnnnnnnnnnnnnnnnnnnnnnnnnnnnnnnnnnnnnnnnnnnnnnnnnnnnnnnnnnnnnnnnnnnnnnnnnnnnnnnnnnnnnnnnnnnnnnnnnnnnnnnnnnnnnnnnnnnnnnnnnnnnnnnnnnnnnnnnnnnnnnnnnnnnnnnnnnnnnnnnnnnnnnnnnnnnnnnnnnnnnnnnnnnnnnnnnnnnnnnnnnnnnnnnnnnnnnnnnnnnnnnnnnnnnnnnnnnnnnnnnnnnnnnnnnnnnnnnnnnnnnnnnnnnnnnnnnnnnnnnnnnnnnnnnnnnnnnnnnnnnnnnnnnnnnnnnnnnnnnnnnnnnnnnnnnnnnnnnnnnnnnnnnnnnnnnnnnnnnnnnnnnnnnnnnnnnnnnnnnnnnnnnnnnnnnnnnnnnnnnnnnnnnnnnnnnnnnnnnnnnnnnnnnnnnnnnnnnnnnnnnnnnnnnnnnnnnnnnnnnnnnnnnnnnnnnnnnnnnnnnnnnnnnnnnnnnnnnnnnnnnnnnnnnnnnnnnnnnnnnnnnnnnnnnnnnnnnnnnnnnnnnnnnnnnnnnnnnnnnnnnnnnnnnnnnnnnnnnnnnnnnnnnnnnnnnnnnnnnnnnnnnnnnnnnnnnnnnnnnnnnnnnnnnnnnnnnnnnnnnnnnnnnnnnnnnnnnnnnnnnnnnnnnnnnnnnnnnnnnnnnnnnnnnnnnnnnnnnnnnnnnnnnnnnnnnnnnnnnnnnnnnnnnnnnnnnnnnnnnnnnnnnnnnnnnnnnnnnnnnnnnnnnnnnnnnnnnnnnnnnnnnnnnnnnnnnnnnnnnnnnnnnnnnnnnnnnnnnnnnnnnnnnnnnnnnnnnnnnnnnnnnnnnnnnnnnnnnnnnnnnnnnnnnnnnnnnnnnnnnnnnnnnnnnnnnnnnnnnnnnnnnnnnnnnnnnnnnnnnnnnnnnnnnnnnnnnnnnnnnnnnnnnnnnnnnnnnnnnnnnnnnnnnnnnnnnnnnnnnnnnnnnnnnnnnnnnnnnnnnnnnnnnnnnnnnnnnnnnnnnnnnnnnnnnnnnnnnnnnnnnnnnnnnnnnnnnnnnnnnnnnnnnnnnnnnnnnnnnnnnnnnnnnnnnnnnnnnnnnnnnnnnnnnnnnnnnnnnnnnnnnnnnnnnnnnnnnnnnnnnnnnnnnnnnnnnnnnnnnnnnnnnnnnnnnnnnnnnnnnnnnnnnnnnnnnnnnnnnnnnnnnnnnnnnnnnnnnnnnnnnnnnnnnnnnnnnnnnnnnnnnnnnnnnnnnnnnnnnnnnnnnnnnnnnnnnnnnnnnnnnnnnnnnnnnnnnnnnnnnnnnnnnnnnnnnnnnnnnnnnnnnnnnnnnnnnnnnnnnnnnnnnnnnnnnnnnnnnnnnnnnnnnnnnnnnnnnnnnnnnnnnnnnnnnnnnnnnnnnnnnnnnnnnnnnnnnnnnnnnnnnnnnnnnnnnnnnnnnnnnnnnnnnnnnnnnnnnnnnnnnnnnnnnnnnnnnnnnnnnnnnnnnnnnnnnnnnnnnnnnnnnnnnnnnnnnnnnnnnnnnnnnnnnnnnnnnnnnnnnnnnnnnnnnnnnnnnnnnnnnnnnnnnnnnnnnnnnnnnnnnnnnnnnnnnnnnnnnnnnnnnnnnnnnnnnnnnnnnnnnnnnnnnnnnnnnnnnnnnnnnnnnnnnnnnnnnnnnnnnnnnnnnnnnnnnnnnnnnnnnnnnnnnnnnnnnnnnnnnnnnnnnnnnnnnnnnnnnnnnnnnnnnnnnnnnnnnnnnnnnnnnnnnnnnnnnnnnnnnnnnnnnnnnnnnnnnnnnnnnnnnnnnnnnnnnnnnnnnnnnnnnnnnnnnnnnnnnnnnnnnnnnnnnnnnnnnnnnnnnnnnnnnnnnnnnnnnnnnnnnnnnnnnnnnnnnnnnnnnnnnnnnnnnnnnnnnnnnnnnnnnnnnnnnnnnnnnnnnnnnnnnnnnnnnnnnnnnnnnnnnnnnnnnnnnnnnnnnnnnnnnnnnnnnnnnnnnnnnnnnnnnnnnnnnnnnnnnnnnnnnnnnnnnnnnnnnnnnnnnnnnnnnnnnnnnnnnnnnnnnnnnnnnnnnnnnnnnnnnnnnnnnnnnnnnnnnnnnnnnnnnnnnnnnnnnnnnnnnnnnnnnnnnnnnnnnnnnnnnnnnnnnnnnnnnnnnnnnnnnnnnnnnnnnnnnnnnnnnnnnnnnnnnnnnnnnnnnnnnnnnnnnnnnnnnnnnnnnnnnnnnnnnnnnnnnnnnnnnnnnnnnnnnnnnnnnnnnnnnnnnnnnnnnnnnnnnnnnnnnnnnnnnnnnnnnnnnnnnnnnnnnnnnnnnnnnnnnnnnnnnnnnnnnnnnnnnnnnnnnnnnnnnnnnnnnnnnnnnnnnnnnnnnnnnnnnnnnnnnnnnnnnnnnnnnnnnnnnnnnnnnnnnnnnnnnnnnnnnnnnnnnnnnnnnnnnnnnnnnnnnnnnnnnnnnnnnnnnnnnnnnnnnnnnnnnnnnnnnnnnnnnnnnnnnnnnnnnnnnnnnnnnnnnnnnnnnnnnnnnnnnnnnnnnnnnnnnnnnnnnnnnnnnnnnnnnnnnnnnnnnnnnnnnnnnnnnnnnnnnnnnnnnnnnnnnnnnnnnnnnnnnnnnnnnnnnnnnnnnnnnnnnnnnnnnnnnnnnnnnnnnnnnnnnnnnnnnnnnnnnnnnnnnnnnnnnnnnnnnnnnnnnnnnnnnnnnnnnnnnnnnnnnnnnnnnnnnnnnnnnnnnnnnnnnnnnnnnnnnnnnnnnnnnnnnnnnnnnnnnnnnnnnnnnnnnnnnnnnnnnnnnnnnnnnnnnnnnnnnnnnnnnnnnnnnnnnnnnnnnnnnnnnnnnnnnnnnnnnnnnnnnnnnnnnnnnnnnnnnnnnnnnnnnnnnnnnnnnnnnnnnnnnnnnnnnnnnnnnnnnnnnnnnnnnnnnnnnnnnnnnnnnnnnnnnnnnnnnnnnnnnnnnnnnnnnnnnnnnnnnnnnnnnnnnnnnnnnnnnnnnnnnnnnnnnnnnnnnnnnnnnnnnnnnnnnnnnnnnnnnnnnnnnnnnnnnnnnnnnnnnnnnnnnnnnnnnnnnnnnnnnnnnnnnnnnnnnnnnnnnnnnnnnnnnnnnnnnnnnnnnnnnnnnnnnnnnnnnnnnnnnnnnnnnnnnnnnnnnnnnnnnnnnnnnnnnnnnnnnnnnnnnnnnnnnnnnnnnnnnnnnnnnnnnnnnnnnnnnnnnnnnnnnnnnnnnnnnnnnnnnnnnnnnnnnnnnnnnnnnnnnnnnnnnnnnnnnnnnnnnnnnnnnnnnnnnnnnnnnnnnnnnnnnnnnnnnnnnnnnnnnnnnnnnnnnnnnnnnnnnnnnnnnnnnnnnnnnnnnnnnnnnnnnnnnnnnnnnnnnnnnnnnnnnnnnnnnnnnnnnnnnnnnnnnnnnnnnnnnnnnnnnnnnnnnnnnnnnnnnnnnnnnnnnnnnnnnnnnnnnnnnnnnnnnnnnnnnnnnnnnnnnnnnnnnnnnnnnnnnnnnnnnnnnnnnnnnnnnnnnnnnnnnnnnnnnnnnnnnnnnnnnnnnnnnnnnnnnnnnnnnnnnnnnnnnnnnnnnnnnnnnnnnnnnnnnnnnnnnnnnnnnnnnnnnnnnnnnnnnnnnnnnnnnnnnnnnnnnnnnnnnnnnnnnnnnnnnnnnnnnnnnnnnnnnnnnnnnnnnnnnnnnnnnnnnnnnnnnnnnnnnnnnnnnnnnnnnnnnnnnnnnnnnnnnnnnnnnnnnnnnnnnnnnnnnnnnnnnnnnnnnnnnnnnnnnnnnnnnnnnnnnnnnnnnnnnnnnnnnnnnnnnnnnnnnnnnnnnnnnnnnnnnnnnnnnnnnnnnnnnnnnnnnnnnnnnnnnnnnnnnnnnnnnnnnnnnnnnnnnnnnnnnnnnnnnnnnnnnnnnnnnnnnnnnnnnnnnnnnnnnnnnnnnnnnnnnnnnnnnnnnnnnnnnnnnnnnnnnnnnnnnnnnnnnnnnnnnnnnnnnnnnnnnnnnnnnnnnnnnnnnnnnnnnnnnnnnnnnnnnnnnnnnnnnnnnnnnnnnnnnnnnnnnnnnnnnnnnnnnnnnnnnnnnnnnnnnnnnnnnnnnnnnnnnnnnnnnnnnnnnnnnnnnnnnnnnnnnnnnnnnnnnnnnnnnnnnnnnnnnnnnnnnnnnnnnnnnnnnnnnnnnnnnnnnnnnnnnnnnnnnnnnnnnnnnnnnnnnnnnnnnnnnnnnnnnnnnnnnnnnnnnnnnnnnnnnnnnnnnnnnnnnnnnnnnnnnnnnnnnnnnnnnnnnnnnnnnnnnnnnnnnnnnnnnnnnnnnnnnnnnnnnnnnnnnnnnnnnnnnnnnnnnnnnnnnnnnnnnnnnnnnnnnnnnnnnnnnnnnnnnnnnnnnnnnnnnnnnnnnnnnnnnnnnnnnnnnnnnnnnnnnnnnnnnnnnnnnnnnnnnnnnnnnnnnnnnnnnnnnnnnnnnnnnnnnnnnnnnnnnnnnnnnnnnnnnnnnnnnnnnnnnnnnnnnnnnnnnnnnnnnnnnnnnnnnnnnnnnnnnnnnnnnnnnnnnnnnnnnnnnnnnnnnnnnnnnnnnnnnnnnnnnnnnnnnnnnnnnnnnnnnnnnnnnnnnnnnnnnnnnnnnnnnnnnnnnnnnnnnnnnnnnnnnnnnnnnnnnnnnnnnnnnnnnnnnnnnnnnnnnnnnnnnnnnnnnnnnnnnnnnnnnnnnnnnnnnnnnnnnnnnnnnnnnnnnnnnnnnnnnnnnnnnnnnnnnnnnnnnnnnnnnnnnnnnnnnnnnnnnnnnnnnnnnnnnnnnnnnnnnnnnnnnnnnnnnnnnnnnnnnnnnnnnnnnnnnnnnnnnnnnnnnnnnnnnnnnnnnnnnnnnnnnnnnnnnnnnnnnnnnnnnnnnnnnnnnnnnnnnnnnnnnnnnnnnnnnnnnnnnnnnnnnnnnnnnnnnnnnnnnnnnnnnnnnnnnnnnnnnnnnnnnnnnnnnnnnnnnnnnnnnnnnnnnnnnnnnnnnnnnnnnnnnnnnnnnnnnnnnnnnnnnnnnnnnnnnnnnnnnnnnnnnnnnnnnnnnnnnnnnnnnnnnnnnnnnnnnnnnnnnnnnnnnnnnnnnnnnnnnnnnnnnnnnnnnnnnnnnnnnnnnnnnnnnnnnnnnnnnnnnnnnnnnnnnnnnnnnnnnnnnnnnnnnnnnnnnnnnnnnnnnnnnnnnnnnnnnnnnnnnnnnnnnnnnnnnnnnnnnnnnnnnnnnnnnnnnnnnnnnnnnnnnnnnnnnnnnnnnnnnnnnnnnnnnnnnnnnnnnnnnnnnnnnnnnnnnnnnnnnnnnnnnnnnnnnnnnnnnnnnnnnnnnnnnnnnnnnnnnnnnnnnnnnnnnnnnnnnnnnnnnnnnnnnnnnnnnnnnnnnnnnnnnnnnnnnnnnnnnnnnnnnnnnnnnnnnnnnnnnnnnnnnnnnnnnnnnnnnnnnnnnnnnnnnnnnnnnnnnnnnnnnnnnnnnnnnnnnnnnnnnnnnnnnnnnnnnnnnnnnnnnnnnnnnnnnnnnnnnnnnnnnnnnnnnnnnnnnnnnnnnnnnnnnnnnnnnnnnnnnnnnnnnnnnnnnnnnnnnnnnnnnnnnnnnnnnnnnnnnnnnnnnnnnnnnnnnnnnnnnnnnnnnnnnnnnnnnnnnnnnnnnnnnnnnnnnnnnnnnnnnnnnnnnnnnnnnnnnnnnnnnnnnnnnnnnnnnnnnnnnnnnnnnnnnnnnnnnnnnnnnnnnnnnnnnnnnnnnnnnnnnnnnnnnnnnnnnnnnnnnnnnnnnnnnnnnnnnnnnnnnnnnnnnnnnnnnnnnnnnnnnnnnnnnnnnnnnnnnnnnnnnnnnnnnnnnnnnnnnnnnnnnnnnnnnnnnnnnnnnnnnnnnnnnnnnnnnnnnnnnnnnnnnnnnnnnnnnnnnnnnnnnnnnnnnnnnnnnnnnnnnnnnnnnnnnnnnnnnnnnnnnnnnnnnnnnnnnnnnnnnnnnnnnnnnnnnnnnnnnnnnnnnnnnnnnnnnnnnnnnnnnnnnnnnnnnnnnnnnnnnnnnnnnnnnnnnnnnnnnnnnnnnnnnnnnnnnnnnnnnnnnnnnnnnnnnnnnnnnnnnnnnnnnnnnnnnnnnnnnnnnnnnnnnnnnnnnnnnnnnnnnnnnnnnnnnnnnnnnnnnnnnnnnnnnnnnnnnnnnnnnnnnnnnnnnnnnnnnnnnnnnnnnnnnnnnnnnnnnnnnnnnnnnnnnnnnnnnnnnnnnnnnnnnnnnnnnnnnnnnnnnnnnnnnnnnnnnnnnnnnnnnnnnnnnnnnnnnnnnnnnnnnnnnnnnnnnnnnnnnnnnnnnnnnnnnnnnnnnnnnnnnnnnnnnnnnnnnnnnnnnnnnnnnnnnnnnnnnnnnnnnnnnnnnnnnnnnnnnnnnnnnnnnnnnnnnnnnnnnnnnnnnnnnnnnnnnnnnnnnnnnnnnnnnnnnnnnnnnnnnnnnnnnnnnnnnnnnnnnnnnnnnnnnnnnnnnnnnnnnnnnnnnnnnnnnnnnnnnnnnnnnnnnnnnnnnnnnnnnnnnnnnnnnnnnnnnnnnnnnnnnnnnnnnnnnnnnnnnnnnnnnnnnnnnnnnnnnnnnnnnnnnnnnnnnnnnnnnnnnnnnnnnnnnnnnnnnnnnnnnnnnnnnnnnnnnnnnnnnnnnnnnnnnnnnnnnnnnnnnnnnnnnnnnnnnnnnnnnnnnnnnnnnnnnnnnnnnnnnnnnnnnnnnnnnnnnnnnnnnnnnnnnnnnnnnnnnnnnnnnnnnnnnnnnnnnnnnnnnnnnnnnnnnnnnnnnnnnnnnnnnnnnnnnnnnnnnnnnnnnnnnnnnnnnnnnnnnnnnnnnnnnnnnnnnnnnnnnnnnnnnnnnnnnnnnnnnnnnnnnnnnnnnnnnnnnnnnnnnnnnnnnnnnnnnnnnnnnnnnnnnnnnnnnnnnnnnnnnnnnnnnnnnnnnnnnnnnnnnnnnnnnnnnnnnnnnnnnnnnnnnnnnnnnnnnnnnnnnnnnnnnnnnnnnnnnnnnnnnnnnnnnnnnnnnnnnnnnnnnnnnnnnnnnnnnnnnnnnnnnnnnnnnnnnnnnnnnnnnnnnnnnnnnnnnnnnnnnnnnnnnnnnnnnnnnnnnnnnnnnnnnnnnnnnnnnnnnnnnnnnnnnnnnnnnnnnnnnnnnnnnnnnnnnnnnnnnnnnnnnnnnnnnnnnnnnnnnnnnnnnnnnnnnnnnnnnnnnnnnnnnnnnnnnnnnnnnnnnnnnnnnnnnnnnnnnnnnnnnnnnnnnnnnnnnnnnnnnnnnnnnnnnnnnnnnnnnnnnnnnnnnnnnnnnnnnnnnnnnnnnnnnnnnnnnnnnnnnnnnnnnnnnnnnnnnnnnnnnnnnnnnnnnnnnnnnnnnnnnnnnnnnnnnnnnnnnnnnnnnnnnnnnnnnnnnnnnnnnnnnnnnnnnnnnnnnnnnnnnnnnnnnnnnnnnnnnnnnnnnnnnnnnnnnnnnnnnnnnnnnnnnnnnnnnnnnnnnnnnnnnnnnnnnnnnnnnnnnnnnnnnnnnnnnnnnnnnnnnnnnnnnnnnnnnnnnnnnnnnnnnnnnnnnnnnnnnnnnnnnnnnnnnnnnnnnnnnnnnnnnnnnnnnnnnnnnnnnnnnnnnnnnnnnnnnnnnnnnnnnnnnnnnnnnnnnnnnnnnnnnnnnnnnnnnnnnnnnnnnnnnnnnnnnnnnnnnnnnnnnnnnnnnnnnnnnnnnnnnnnnnnnnnnnnnnnnnnnnnnnnnnnnnnnnnnnnnnnnnnnnnnnnnnnnnnnnnnnnnnnnnnnnnnnnnnnnnnnnnnnnnnnnnnnnnnnnnnnnnnnnnnnnnnnnnnnnnnnnnnnnnnnnnnnnnnnnnnnnnnnnnnnnnnnnnnnnnnnnnnnnnnnnnnnnnnnnnnnnnnnnnnnnnnnnnnnnnnnnnnnnnnnnnnnnnnnnnnnnnnnnnnnnnnnnnnnnnnnnnnnnnnnnnnnnnnnnnnnnnnnnnnnnnnnnnnnnnnnnnnnnnnnnnnnnnnnnnnnnnnnnnnnnnnnnnnnnnnnnnnnnnnnnnnnnnnnnnnnnnnnnnnnnnnnnnnnnnnnnnnnnnnnnnnnnnnnnnnnnnnnnnnnnnnnnnnnnnnnnnnnnnnnnnnnnnnnnnnnnnnnnnnnnnnnnnnnnnnnnnnnnnnnnnnnnnnnnnnnnnnnnnnnnnnnnnnnnnnnnnnnnnnnnnnnnnnnnnnnnnnnnnnnnnnnnnnnnnnnnnnnnnnnnnnnnnnnnnnnnnnnnnnnnnnnnnnnnnnnnnnnnnnnnnnnnnnnnnnnnnnnnnnnnnnnnnnnnnnnnnnnnnnnnnnnnnnnnnnnnnnnnnnnnnnnnnnnnnnnnnnnnnnnnnnnnnnnnnnnnnnnnnnnnnnnnnnnnnnnnnnnnnnnnnnnnnnnnnnnnnnnnnnnnnnnnnnnnnnnnnnnnnnnnnnnnnnnnnnnnnnnnnnnnnnnnnnnnnnnnnnnnnnnnnnnnnnnnnnnnnnnnnnnnnnnnnnnnnnnnnnnnnnnnnnnnnnnnnnnnnnnnnnnnnnnnnnnnnnnnnnnnnnnnnnnnnnnnnnnnnnnnnnnnnnnnnnnnnnnnnnnnnnnnnnnnnnnnnnnnnnnnnnnnnnnnnnnnnnnnnnnnnnnnnnnnnnnnnnnnnnnnnnnnnnnnnnnnnnnnnnnnnnnnnnnnnnnnnnnnnnnnnnnnnnnnnnnnnnnnnnnnnnnnnnnnnnnnnnnnnnnnnnnnnnnnnnnnnnnnnnnnnnnnnnnnnnnnnnnnnnnnnnnnnnnnnnnnnnnnnnnnnnnnnnnnnnnnnnnnnnnnnnnnnnnnnnnnnnnnnnnnnnnnnnnnnnnnnnnnnnnnnnnnnnnnnnnnnnnnnnnnnnnnnnnnnnnnnnnnnnnnnnnnnnnnnnnnnnnnnnnnnnnnnnnnnnnnnnnnnnnnnnnnnnnnnnnnnnnnnnnnnnnnnnnnnnnnnnnnnnnnnnnnnnnnnnnnnnnnnnnnnnnnnnnnnnnnnnnnnnnnnnnnnnnnnnnnnnnnnnnnnnnnnnnnnnnnnnnnnnnnnnnnnnnnnnnnnnnnnnnnnnnnnnnnnnnnnnnnnnnnnnnnnnnnnnnnnnnnnnnnnnnnnnnnnnnnnnnnnnnnnnnnnnnnnnnnnnnnnnnnnnnnnnnnnnnnnnnnnnnnnnnnnnnnnnnnnnnnnnnnnnnnnnnnnnnnnnnnnnnnnnnnnnnnnnnnnnnnnnnnnnnnnnnnnnnnnnnnnnnnnnnnnnnnnnnnnnnnnnnnnnnnnnnnnnnnnnnnnnnnnnnnnnnnnnnnnnnnnnnnnnnnnnnnnnnnnnnnnnnnnnnnnnnnnnnnnnnnnnnnnnnnnnnnnnnnnnnnnnnnnnnnnnnnnnnnnnnnnnnnnnnnnnnnnnnnnnnnnnnnnnnnnnnnnnnnnnnnnnnnnnnnnnnnnnnnnnnnnnnnnnnnnnnnnnnnnnnnnnnnnnnnnnnnnnnnnnnnnnnnnnnnnnnnnnnnnnnnnnnnnnnnnnnnnnnnnnnnnnnnnnnnnnnnnnnnnnnnnnnnnnnnnnnnnnnnnnnnnnnnnnnnnnnnnnnnnnnnnnnnnnnnnnnnnnnnnnnnnnnnnnnnnnnnnnnnnnnnnnnnnnnnnnnnnnnnnnnnnnnnnnnnnnnnnnnnnnnnnnnnnnnnnnnnnnnnnnnnnnnnnnnnnnnnnnnnnnnnnnnnnnnnnnnnnnnnnnnnnnnnnnnnnnnnnnnnnnnnnnnnnnnnnnnnnnnnnnnnnnnnnnnnnnnnnnnnnnnnnnnnnnnnnnnnnnnnnnnnnnnnnnnnnnnnnnnnnnnnnnnnnnnnnnnnnnnnnnnnnnnnnnnnnnnnnnnnnnnnnnnnnnnnnnnnnnnnnnnnnnnnnnnnnnnnnnnnnnnnnnnnnnnnnnnnnnnnnnnnnnnnnnnnnnnnnnnnnnnnnnnnnnnnnnnnnnnnnnnnnnnnnnnnnnnnnnnnnnnnnnnnnnnnnnnnnnnnnnnnnnnnnnnnnnnnnnnnnnnnnnnnnnnnnnnnnnnnnnnnnnnnnnnnnnnnnnnnnnnnnnnnnnnnnnnnnnnnnnnnnnnnnnnnnnnnnnnnnnnnnnnnnnnnnnnnnnnnnnnnnnnnnnnnnnnnnnnnnnnnnnnnnnnnnnnnnnnnnnnnnnnnnnnnnnnnnnnnnnnnnnnnnnnnnnnnnnnnnnnnnnnnnnnnnnnnnnnnnnnnnnnnnnnnnnnnnnnnnnnnnnnnnnnnnnnnnnnnnnnnnnnnnnnnnnnnnnnnnnnnnnnnnnnnnnnnnnnnnnnnnnnnnnnnnnnnnnnnnnnnnnnnnnnnnnnnnnnnnnnnnnnnnnnnnnnnnnnnnnnnnnnnnnnnnnnnnnnnnnnnnnnnnnnnnnnnnnnnnnnnnnnnnnnnnnnnnnnnnnnnnnnnnnnnnnnnnnnnnnnnnnnnnnnnnnnnnnnnnnnnnnnnnnnnnnnnnnnnnnnnnnnnnnnnnnnnnnnnnnnnnnnnnnnnnnnnnnnnnnnnnnnnnnnnnnnnnnnnnnnnnnnnnnnnnnnnnnnnnnnnnnnnnnnnnnnnnnnnnnnnnnnnnnnnnnnnnnnnnnnnnnnnnnnnnnnnnnnnnnnnnnnnnnnnnnnnnnnnnnnnnnnnnnnnnnnnnnnnnnnnnnnnnnnnnnnnnnnnnnnnnnnnnnnnnnnnnnnnnnnnnnnnnnnnnnnnnnnnnnnnnnnnnnnnnnnnnnnnnnnnnnnnnnnnnnnnnnnnnnnnnnnnnnnnnnnnnnnnnnnnnnnnnnnnnnnnnnnnnnnnnnnnnnnnnnnnnnnnnnnnnnnnnnnnnnnnnnnnnnnnnnnnnnnnnnnnnnnnnnnnnnnnnnnnnnnnnnnnnnnnnnnnnnnnnnnnnnnnnnnnnnnnnnnnnnnnnnnnnnnnnnnnnnnnnnnnnnnnnnnnnnnnnnnnnnnnnnnnnnnnnnnnnnnnnnnnnnnnnnnnnnnnnnnnnnnnnnnnnnnnnnnnnnnnnnnnnnnnnnnnnnnnnnnnnnnnnnnnnnnnnnnnnnnnnnnnnnnnnnnnnnnnnnnnnnnnnnnnnnnnnnnnnnnnnnnnnnnnnnnnnnnnnnnnnnnnnnnnnnnnnnnnnnnnnnnnnnnnnnnnnnnnnnnnnnnnnnnnnnnnnnnnnnnnnnnnnnnnnnnnnnnnnnnnnnnnnnnnnnnnnnnnnnnnnnnnnnnnnnnnnnnnnnnnnnnnnnnnnnnnnnnnnnnnnnnnnnnnnnnnnnnnnnnnnnnnnnnnnnnnnnnnnnnnnnnnnnnnnnnnnnnnnnnnnnnnnnnnnnnnnnnnnnnnnnnnnnnnnnnnnnnnnnnnnnnnnnnnnnnnnnnnnnnnnnnnnnnnnnnnnnnnnnnnnnnnnnnnnnnnnnnnnnnnnnnnnnnnnnnnnnnnnnnnnnnnnnnnnnnnnnnnnnnnnnnnnnnnnnnnnnnnnnnnnnnnnnnnnnnnnnnnnnnnnnnnnnnnnnnnnnnnnnnnnnnnnnnnnnnnnnnnnnnnnnnnnnnnnnnnnnnnnnnnnnnnnnnnnnnnnnnnnnnnnnnnnnnnnnnnnnnnnnnnnnnnnnnnnnnnnnnnnnnnnnnnnnnnnnnnnnnnnnnnnnnnnnnnnnnnnnnnnnnnnnnnnnnnnnnnnnnnnnnnnnnnnnnnnnnnnnnnnnnnnnnnnnnnnnnnnnnnnnnnnnnnnnnnnnnnnnnnnnnnnnnnnnnnnnnnnnnnnnnnnnnnnnnnnnnnnnnnnnnnnnnnnnnnnnnnnnnnnnnnnnnnnnnnnnnnnnnnnnnnnnnnnnnnnnnnnnnnnnnnnnnnnnnnnnnnnnnnnnnnnnnnnnnnnnnnnnnnnnnnnnnnnnnnnnnnnnnnnnnnnnnnnnnnnnnnnnnnnnnnnnnnnnnnnnnnnnnnnnnnnnnnnnnnnnnnnnnnnnnnnnnnnnnnnnnnnnnnnnnnnnnnnnnnnnnnnnnnnnnnnnnnnnnnnnnnnnnnnnnnnnnnnnnnnnnnnnnnnnnnnnnnnnnnnnnnnnnnnnnnnnnnnnnnnnnnnnnnnnnnnnnnnnnnnnnnnnnnnnnnnnnnnnnnnnnnnnnnnnnnnnnnnnnnnnnnnnnnnnnnnnnnnnnnnnnnnnnnnnnnnnnnnnnnnnnnnnnnnnnnnnnnnnnnnnnnnnnnnnnnnnnnnnnnnnnnnnnnnnnnnnnnnnnnnnnnnnnnnnnnnnnnnnnnnnnnnnnnnnnnnnnnnnnnnnnnnnnnnnnnnnnnnnnnnnnnnnnnnnnnnnnnnnnnnnnnnnnnnnnnnnnnnnnnnnnnnnnnnnnnnnnnnnnnnnnnnnnnnnnnnnnnnnnnnnnnnnnnnnnnnnnnnnnnnnnnnnnnnnnnnnnnnnnnnnnnnnnnnnnnnnnnnnnnnnnnnnnnnnnnnnnnnnnnnnnnnnnnnnnnnnnnnnnnnnnnnnnnnnnnnnnnnnnnnnnnnnnnnnnnnnnnnnnnnnnnnnnnnnnnnnnnnnnnnnnnnnnnnnnnnnnnnnnnnnnnnnnnnnnnnnnnnnnnnnnnnnnnnnnnnnnnnnnnnnnnnnnnnnnnnnnnnnnnnnnnnnnnnnnnnnnnnnnnnnnnnnnnnnnnnnnnnnnnnnnnnnnnnnnnnnnnnnnnnnnnnnnnnnnnnnnnnnnnnnnnnnnnnnnnnnnnnnnnnnnnnnnnnnnnnnnnnnnnnnnnnnnnnnnnnnnnnnnnnnnnnnnnnnnnnnnnnnnnnnnnnnnnnnnnnnnnnnnnnnnnnnnnnnnnnnnnnnnnnnnnnnnnnnnnnnnnnnnnnnnnnnnnnnnnnnnnnnnnnnnnnnnnnnnnnnnnnnnnnnnnnnnnnnnnnnnnnnnnnnnnnnnnnnnnnnnnnnnnnnnnnnnnnnnnnnnnnnnnnnnnnnnnnnnnnnnnnnnnnnnnnnnnnnnnnnnnnnnnnnnnnnnnnnnnnnnnnnnnnnnnnnnnnnnnnnnnnnnnnnnnnnnnnnnnnnnnnnnnnnnnnnnnnnnnnnnnnnnnnnnnnnnnnnnnnnnnnnnnnnnnnnnnnnnnnnnnnnnnnnnnnnnnnnnnnnnnnnnnnnnnnnnnnnnnnnnnnnnnnnnnnnnnnnnnnnnnnnnnnnnnnnnnnnnnnnnnnnnnnnnnnnnnnnnnnnnnnnnnnnnnnnnnnnnnnnnnnnnnnnnnnnnnnnnnnnnnnnnnnnnnnnnnnnnnnnnnnnnnnnnnnnnnnnnnnnnnnnnnnnnnnnnnnnnnnnnnnnnnnnnnnnnnnnnnnnnnnnnnnnnnnnnnnnnnnnnnnnnnnnnnnnnnnnnnnnnnnnnnnnnnnnnnnnnnnnnnnnnnnnnnnnnnnnnnnnnnnnnnnnnnnnnnnnnnnnnnnnnnnnnnnnnnnnnnnnnnnnnnnnnnnnnnnnnnnnnnnnnnnnnnnnnnnnnnnnnnnnnnnnnnnnnnnnnnnnnnnnnnnnnnnnnnnnnnnnnnnnnnnnnnnnnnnnnnnnnnnnnnnnnnnnnnnnnnnnnnnnnnnnnnnnnnnnnnnnnnnnnnnnnnnnnnnnnnnnnnnnnnnnnnnnnnnnnnnnnnnnnnnnnnnnnnnnnnnnnnnnnnnnnnnnnnnnnnnnnnnnnnnnnnnnnnnnnnnnnnnnnnnnnnnnnnnnnnnnnnnnnnnnnnnnnnnnnnnnnnnnnnnnnnnnnnnnnnnnnnnnnnnnnnnnnnnnnnnnnnnnnnnnnnnnnnnnnnnnnnnnnnnnnnnnnnnnnnnnnnnnnnnnnnnnnnnnnnnnnnnnnnnnnnnnnnnnnnnnnnnnnnnnnnnnnnnnnnnnnnnnnnnnnnnnnnnnnnnnnnnnnnnnnnnnnnnnnnnnnnnnnnnnnnnnnnnnnnnnnnnnnnnnnnnnnnnnnnnnnnnnnnnnnnnnnnnnnnnnnnnnnnnnnnnnnnnnnnnnnnnnnnnnnnnnnnnnnnnnnnnnnnnnnnnnnnnnnnnnnnnnnnnnnnnnnnnnnnnnnnnnnnnnnnnnnnnnnnnnnnnnnnnnnnnnnnnnnnnnnnnnnnnnnnnnnnnnnnnnnnnnnnnnnnnnnnnnnnnnnnnnnnnnnnnnnnnnnnnnnnnnnnnnnnnnnnnnnnnnnnnnnnnnnnnnnnnnnnnnnnnnnnnnnnnnnnnnnnnnnnnnnnnnnnnnnnnnnnnnnnnnnnnnnnnnnnnnnnnnnnnnnnnnnnnnnnnnnnnnnnnnnnnnnnnnnnnnnnnnnnnnnnnnnnnnnnnnnnnnnnnnnnnnnnnnnnnnnnnnnnnnnnnnnnnnnnnnnnnnnnnnnnnnnnnnnnnnnnnnnnnnnnnnnnnnnnnnnnnnnnnnnnnnnnnnnnnnnnnnnnnnnnnnnnnnnnnnnnnnnnnnnnnnnnnnnnnnnnnnnnnnnnnnnnnnnnnnnnnnnnnnnnnnnnnnnnnnnnnnnnnnnnnnnnnnnnnnnnnnnnnnnnnnnnnnnnnnnnnnnnnnnnnnnnnnnnnnnnnnnnnnnnnnnnnnnnnnnnnnnnnnnnnnnnnnnnnnnnnnnnnnnnnnnnnnnnnnnnnnnnnnnnnnnnnnnnnnnnnnnnnnnnnnnnnnnnnnnnnnnnnnnnnnnnnnnnnnnnnnnnnnnnnnnnnnnnnnnnnnnnnnnnnnnnnnnnnnnnnnnnnnnnnnnnnnnnnnnnnnnnnnnnnnnnnnnnnnnnnnnnnnnnnnnnnnnnnnnnnnnnnnnnnnnnnnnnnnnnnnnnnnnnnnnnnnnnnnnnnnnnnnnnnnnnnnnnnnnnnnnnnnnnnnnnnnnnnnnnnnnnnnnnnnnnnnnnnnnnnnnnnnnnnnnnnnnnnnnnnnnnnnnnnnnnnnnnnnnnnnnnnnnnnnnnnnnnnnnnnnnnnnnnnnnnnnnnnnnnnnnnnnnnnnnnnnnnnnnnnnnnnnnnnnnnnnnnnnnnnnnnnnnnnnnnnnnnnnnnnnnnnnnnnnnnnnnnnnnnnnnnnnnnnnnnnnnnnnnnnnnnnnnnnnnnnnnnnnnnnnnnnnnnnnnnnnnnnnnnnnnnnnnnnnnnnnnnnnnnnnnnnnnnnnnnnnnnnnnnnnnnnnnnnnnnnnnnnnnnnnnnnnnnnnnnnnnnnnnnnnnnnnnnnnnnnnnnnnnnnnnnnnnnnnnnnnnnnnnnnnnnnnnnnnnnnnnnnnnnnnnnnnnnnnnnnnnnnnnnnnnnnnnnnnnnnnnnnnnnnnnnnnnnnnnnnnnnnnnnnnnnnnnnnnnnnnnnnnnnnnnnnnnnnnnnnnnnnnnnnnnnnnnnnnnnnnnnnnnnnnnnnnnnnnnnnnnnnnnnnnnnnnnnnnnnnnnnnnnnnnnnnnnnnnnnnnnnnnnnnnnnnnnnnnnnnnnnnnnnnnnnnnnnnnnnnnnnnnnnnnnnnnnnnnnnnnnnnnnnnnnnnnnnnnnnnnnnnnnnnnnnnnnnnnnnnnnnnnnnnnnnnnnnnnnnnnnnnnnnnnnnnnnnnnnnnnnnnnnnnnnnnnnnnnnnnnnnnnnnnnnnnnnnnnnnnnnnnnnnnnnnnnnnnnnnnnnnnnnnnnnnnnnnnnnnnnnnnnnnnnnnnnnnnnnnnnnnnnnnnnnnnnnnnnnnnnnnnnnnnnnnnnnnnnnnnnnnnnnnnnnnnnnnnnnnnnnnnnnnnnnnnnnnnnnnnnnnnnnnnnnnnnnnnnnnnnnnnnnnnnnnnnnnnnnnnnnnnnnnnnnnnnnnnnnnnnnnnnnnnnnnnnnnnnnnnnnnnnnnnnnnnnnnnnnnnnnnnnnnnnnnnnnnnnnnnnnnnnnnnnnnnnnnnnnnnnnnnnnnnnnnnnnnnnnnnnnnnnnnnnnnnnnnnnnnnnnnnnnnnnnnnnnnnnnnnnnnnnnnnnnnnnnnnnnnnnnnnnnnnnnnnnnnnnnnnnnnnnnnnnnnnnnnnnnnnnnnnnnnnnnnnnnnnnnnnnnnnnnnnnnnnnnnnnnnnnnnnnnnnnnnnnnnnnnnnnnnnnnnnnnnnnnnnnnnnnnnnnnnnnnnnnnnnnnnnnnnnnnnnnnnnnnnnnnnnnnnnnnnnnnnnnnnnnnnnnnnnnnnnnnnnnnnnnnnnnnnnnnnnnnnnnnnnnnnnnnnnnnnnnnnnnnnnnnnnnnnnnnnnnnnnnnnnnnnnnnnnnnnnnnnnnnnnnnnnnnnnnnnnnnnnnnnnnnnnnnnnnnnnnnnnnnnnnnnnnnnnnnnnnnnnnnnnnnnnnnnnnnnnnnnnnnnnnnnnnnnnnnnnnnnnnnnnnnnnnnnnnnnnnnnnnnnnnnnnnnnnnnnnnnnnnnnnnnnnnnnnnnnnnnnnnnnnnnnnnnnnnnnnnnnnnnnnnnnnnnnnnnnnnnnnnnnnnnnnnnnnnnnnnnnnnnnnnnnnnnnnnnnnnnnnnnnnnnnnnnnnnnnnnnnnnnnnnnnnnnnnnnnnnnnnnnnnnnnnnnnnnnnnnnnnnnnnnnnnnnnnnnnnnnnnnnnnnnnnnnnnnnnnnnnnnnnnnnnnnnnnnnnnnnnnnnnnnnnnnnnnnnnnnnnnnnnnnnnnnnnnnnnnnnnnnnnnnnnnnnnnnnnnnnnnnnnnnnnnnnnnnnnnnnnnnnnnnnnnnnnnnnnnnnnnnnnnnnnnnnnnnnnnnnnnnnnnnnnnnnnnnnnnnnnnnnnnnnnnnnnnnnnnnnnnnnnnnnnnnnnnnnnnnnnnnnnnnnnnnnnnnnnnnnnnnnnnnnnnnnnnnnnnnnnnnnnnnnnnnnnnnnnnnnnnnnnnnnnnnnnnnnnnnnnnnnnnnnnnnnnnnnnnnnnnnnnnnnnnnnnnnnnnnnnnnnnnnnnnnnnnnnnnnnnnnnnnnnnnnnnnnnnnnnnnnnnnnnnnnnnnnnnnnnnnnnnnnnnnnnnnnnnnnnnnnnnnnnnnnnnnnnnnnnnnnnnnnnnnnnnnnnnnnnnnnnnnnnnnnnnnnnnnnnnnnnnnnnnnnnnnnnnnnnnnnnnnnnnnnnnnnnnnnnnnnnnnnnnnnnnnnnnnnnnnnnnnnnnnnnnnnnnnnnnnnnnnnnnnnnnnnnnnnnnnnnnnnnnnnnnnnnnnnnnnnnnnnnnnnnnnnnnnnnnnnnnnnnnnnnnnnnnnnnnnnnnnnnnnnnnnnnnnnnnnnnnnnnnnnnnnnnnnnnnnnnnnnnnnnnnnnnnnnnnnnnnnnnnnnnnnnnnnnnnnnnnnnnnnnnnnnnnnnnnnnnnnnnnnnnnnnnnnnnnnnnnnnnnnnnnnnnnnnnnnnnnnnnnnnnnnnnnnnnnnnnnnnnnnnnnnnnnnnnnnnnnnnnnnnnnnnnnnnnnnnnnnnnnnnnnnnnnnnnnnnnnnnnnnnnnnnnnnnnnnnnnnnnnnnnnnnnnnnnnnnnnnnnnnnnnnnnnnnnnnnnnnnnnnnnnnnnnnnnnnnnnnnnnnnnnnnnnnnnnnnnnnnnnnnnnnnnnnnnnnnnnnnnnnnnnnnnnnnnnnnnnnnnnnnnnnnnnnnnnnnnnnnnnnnnnnnnnnnnnnnnnnnnnnnnnnnnnnnnnnnnnnnnnnnnnnnnnnnnnnnnnnnnnnnnnnnnnnnnnnnnnnnnnnnnnnnnnnnnnnnnnnnnnnnnnnnnnnnnnnnnnnnnnnnnnnnnnnnnnnnnnnnnnnnnnnnnnnnnnnnnnnnnnnnnnnnnnnnnnnnnnnnnnnnnnnnnnnnnnnnnnnnnnnnnnnnnnnnnnnnnnnnnnnnnnnnnnnnnnnnnnnnnnnnnnnnnnnnnnnnnnnnnnnnnnnnnnnnnnnnnnnnnnnnnnnnnnnnnnnnnnnnnnnnnnnnnnnnnnnnnnnnnnnnnnnnnnnnnnnnnnnnnnnnnnnnnnnnnnnnnnnnnnnnnnnnnnnnnnnnnnnnnnnnnnnnnnnnnnnnnnnnnnnnnnnnnnnnnnnnnnnnnnnnnnnnnnnnnnnnnnnnnnnnnnnnnnnnnnnnnnnnnnnnnnnnnnnnnnnnnnnnnnnnnnnnnnnnnnnnnnnnnnnnnnnnnnnnnnnnnnnnnnnnnnnnnnnnnnnnnnnnnnnnnnnnnnnnnnnnnnnnnnnnnnnnnnnnnnnnnnnnnnnnnnnnnnnnnnnnnnnnnnnnnnnnnnnnnnnnnnnnnnnnnnnnnnnnnnnnnnnnnnnnnnnnnnnnnnnnnnnnnnnnnnnnnnnnnnnnnnnnnnnnnnnnnnnnnnnnnnnnnnnnnnnnnnnnnnnnnnnnnnnnnnnnnnnnnnnnnnnnnnnnnnnnnnnnnnnnnnnnnnnnnnnnnnnnnnnnnnnnnnnnnnnnnnnnnnnnnnnnnnnnnnnnnnnnnnnnnnnnnnnnnnnnnnnnnnnnnnnnnnnnnnnnnnnnnnnnnnnnnnnnnnnnnnnnnnnnnnnnnnnnnnnnnnnnnnnnnnnnnnnnnnnnnnnnnnnnnnnnnnnnnnnnnnnnnnnnnnnnnnnnnnnnnnnnnnnnnnnnnnnnnnnnnnnnnnnnnnnnnnnnnnnnnnnnnnnnnnnnnnnnnnnnnnnnnnnnnnnnnnnnnnnnnnnnnnnnnnnnnnnnnnnnnnnnnnnnnnnnnnnnnnnnnnnnnnnnnnnnnnnnnnnnnnnnnnnnnnnnnnnnnnnnnnnnnnnnnnnnnnnnnnnnnnnnnnnnnnnnnnnnnnnnnnnnnnnnnnnnnnnnnnnnnnnnnnnnnnnnnnnnnnnnnnnnnnnnnnnnnnnnnnnnnnnnnnnnnnnnnnnnnnnnnnnnnnnnnnnnnnnnnnnnnnnnnnnnnnnnnnnnnnnnnnnnnnnnnnnnnnnnnnnnnnnnnnnnnnnnnnnnnnnnnnnnnnnnnnnnnnnnnnnnnnnnnnnnnnnnnnnnnnnnnnnnnnnnnnnnnnnnnnnnnnnnnnnnnnnnnnnnnnnnnnnnnnnnnnnnnnnnnnnnnnnnnnnnnnnnnnnnnnnnnnnnnnnnnnnnnnnnnnnnnnnnnnnnnnnnnnnnnnnnnnnnnnnnnnnnnnnnnnnnnnnnnnnnnnnnnnnnnnnnnnnnnnnnnnnnnnnnnnnnnnnnnnnnnnnnnnnnnnnnnnnnnnnnnnnnnnnnnnnnnnnnnnnnnnnnnnnnnnnnnnnnnnnnnnnnnnnnnnnnnnnnnnnnnnnnnnnnnnnnnnnnnnnnnnnnnnnnnnnnnnnnnnnnnnnnnnnnnnnnnnnnnnnnnnnnnnnnnnnnnnnnnnnnnnnnnnnnnnnnnnnnnnnnnnnnnnnnnnnnnnnnnnnnnnnnnnnnnnnnnnnnnnnnnnnnnnnnnnnnnnnnnnnnnnnnnnnnnnnnnnnnnnnnnnnnnnnnnnnnnnnnnnnnnnnnnnnnnnnnnnnnnnnnnnnnnnnnnnnnnnnnnnnnnnnnnnnnnnnnnnnnnnnnnnnnnnnnnnnnnnnnnnnnnnnnnnnnnnnnnnnnnnnnnnnnnnnnnnnnnnnnnnnnnnnnnnnnnnnnnnnnnnnnnnnnnnnnnnnnnnnnnnnnnnnnnnnnnnnnnnnnnnnnnnnnnnnnnnnnnnnnnnnnnnnnnnnnnnnnnnnnnnnnnnnnnnnnnnnnnnnnnnnnnnnnnnnnnnnnnnnnnnnnnnnnnnnnnnnnnnnnnnnnnnnnnnnnnnnnnnnnnnnnnnnnnnnnnnnnnnnnnnnnnnnnnnnnnnnnnnnnnnnnnnnnnnnnnnnnnnnnnnnnnnnnnnnnnnnnnnnnnnnnnnnnnnnnnnnnnnnnnnnnnnnnnnnnnnnnnnnnnnnnnnnnnnnnnnnnnnnnnnnnnnnnnnnnnnnnnnnnnnnnnnnnnnnnnnnnnnnnnnnnnnnnnnnnnnnnnnnnnnnnnnnnnnnnnnnnnnnnnnnnnnnnnnnnnnnnnnnnnnnnnnnnnnnnnnnnnnnnnnnnnnnnnnnnnnnnnnnnnnnnnnnnnnnnnnnnnnnnnnnnnnnnnnnnnnnnnnnnnnnnnnnnnnnnnnnnnnnnnnnnnnnnnnnnnnnnnnnnnnnnnnnnnnnnnnnnnnnnnnnnnnnnnnnnnnnnnnnnnnnnnnnnnnnnnnnnnnnnnnnnnnnnnnnnnnnnnnnnnnnnnnnnnnnnnnnnnnnnnnnnnnnnnnnnnnnnnnnnnnnnnnnnnnnnnnnnnnnnnnnnnnnnnnnnnnnnnnnnnnnnnnnnnnnnnnnnnnnnnnnnnnnnnnnnnnnnnnnnnnnnnnnnnnnnnnnnnnnnnnnnnnnnnnnnnnnnnnnnnnnnnnnnnnnnnnnnnnnnnnnnnnnnnnnnnnnnnnnnnnnnnnnnnnnnnnnnnnnnnnnnnnnnnnnnnnnnnnnnnnnnnnnnnnnnnnnnnnnnnnnnnnnnnnnnnnnnnnnnnnnnnnnnnnnnnnnnnnnnnnnnnnnnnnnnnnnnnnnnnnnnnnnnnnnnnnnnnnnnnnnnnnnnnnnnnnnnnnnnnnnnnnnnnnnnnnnnnnnnnnnnnnnnnnnnnnnnnnnnnnnnnnnnnnnnnnnnnnnnnnnnnnnnnnnnnnnnnnnnnnnnnnnnnnnnnnnnnnnnnnnnnnnnnnnnnnnnnnnnnnnnnnnnnnnnnnnnnnnnnnnnnnnnnnnnnnnnnnnnnnnnnnnnnnnnnnnnnnnnnnnnnnnnnnnnnnnnnnnnnnnnnnnnnnnnnnnnnnnnnnnnnnnnnnnnnnnnnnnnnnnnnnnnnnnnnnnnnnnnnnnnnnnnnnnnnnnnnnnnnnnnnnnnnnnnnnnnnnnnnnnnnnnnnnnnnnnnnnnnnnnnnnnnnnnnnnnnnnnnnnnnnnnnnnnnnnnnnnnnnnnnnnnnnnnnnnnnnnnnnnnnnnnnnnnnnnnnnnnnnnnnnnnnnnnnnnnnnnnnnnnnnnnnnnnnnnnnnnnnnnnnnnnnnnnnnnnnnnnnnnnnnnnnnnnnnnnnnnnnnnnnnnnnnnnnnnnnnnnnnnnnnnnnnnnnnnnnnnnnnnnnnnnnnnnnnnnnnnnnnnnnnnnnnnnnnnnnnnnnnnnnnnnnnnnnnnnnnnnnnnnnnnnnnnnnnnnnnnnnnnnnnnnnnnnnnnnnnnnnnnnnnnnnnnnnnnnnnnnnnnnnnnnnnnnnnnnnnnnnnnnnnnnnnnnnnnnnnnnnnnnnnnnnnnnnnnnnnnnnnnnnnnnnnnnnnnnnnnnnnnnnnnnnnnnnnnnnnnnnnnnnnnnnnnnnnnnnnnnnnnnnnnnnnnnnnnnnnnnnnnnnnnnnnnnnnnnnnnnnnnnnnnnnnnnnnnnnnnnnnnnnnnnnnnnnnnnnnnnnnnnnnnnnnnnnnnnnnnnnnnnnnnnnnnnnnnnnnnnnnnnnnnnnnnnnnnnnnnnnnnnnnnnnnnnnnnnnnnnnnnnnnnnnnnnnnnnnnnnnnnnnnnnnnnnnnnnnnnnnnnnnnnnnnnnnnnnnnnnnnnnnnnnnnnnnnnnnnnnnnnnnnnnnnnnnnnnnnnnnnnnnnnnnnnnnnnnnnnnnnnnnnnnnnnnnnnnnnnnnnnnnnnnnnnnnnnnnnnnnnnnnnnnnnnnnnnnnnnnnnnnnnnnnnnnnnnnnnnnnnnnnnnnnnnnnnnnnnnnnnnnnnnnnnnnnnnnnnnnnnnnnnnnnnnnnnnnnnnnnnnnnnnnnnnnnnnnnnnnnnnnnnnnnnnnnnnnnnnnnnnnnnnnnnnnnnnnnnnnnnnnnnnnnnnnnnnnnnnnnnnnnnnnnnnnnnnnnnnnnnnnnnnnnnnnnnnnnnnnnnnnnnnnnnnnnnnnnnnnnnnnnnnnnnnnnnnnnnnnnnnnnnnnnnnnnnnnnnnnnnnnnnnnnnnnnnnnnnnnnnnnnnnnnnnnnnnnnnnnnnnnnnnnnnnnnnnnnnnnnnnnnnnnnnnnnnnnnnnnnnnnnnnnnnnnnnnnnnnnnnnnnnnnnnnnnnnnnnnnnnnnnnnnnnnnnnnnnnnnnnnnnnnnnnnnnnnnnnnnnnnnnnnnnnnnnnnnnnnnnnnnnnnnnnnnnnnnnnnnnnnnnnnnnnnnnnnnnnnnnnnnnnnnnnnnnnnnnnnnnnnnnnnnnnnnnnnnnnnnnnnnnnnnnnnnnnnnnnnnnnnnnnnnnnnnnnnnnnnnnnnnnnnnnnnnnnnnnnnnnnnnnnnnnnnnnnnnnnnnnnnnnnnnnnnnnnnnnnnnnnnnnnnnnnnnnnnnnnnnnnnnnnnnnnnnnnnnnnnnnnnnnnnnnnnnnnnnnnnnnnnnnnnnnnnnnnnnnnnnnnnnnnnnnnnnnnnnnnnnnnnnnnnnnnnnnnnnnnnnnnnnnnnnnnnnnnnnnnnnnnnnnnnnnnnnnnnnnnnnnnnnnnnnnnnnnnnnnnnnnnnnnnnnnnnnnnnnnnnnnnnnnnnnnnnnnnnnnnnnnnnnnnnnnnnnnnnnnnnnnnnnnnnnnnnnnnnnnnnnnnnnnnnnnnnnnnnnnnnnnnnnnnnnnnnnnnnnnnnnnnnnnnnnnnnnnnnnnnnnnnnnnnnnnnnnnnnnnnnnnnnnnnnnnnnnnnnnnnnnnnnnnnnnnnnnnnnnnnnnnnnnnnnnnnnnnnnnnnnnnnnnnnnnnnnnnnnnnnnnnnnnnnnnnnnnnnnnnnnnnnnnnnnnnnnnnnnnnnnnnnnnnnnnnnnnnnnnnnnnnnnnnnnnnnnnnnnnnnnnnnnnnnnnnnnnnnnnnnnnnnnnnnnnnnnnnnnnnnnnnnnnnnnnnnnnnnnnnnnnnnnnnnnnnnnnnnnnnnnnnnnnnnnnnnnnnnnnnnnnnnnnnnnnnnnnnnnnnnnnnnnnnnnnnnnnnnnnnnnnnnnnnnnnnnnnnnnnnnnnnnnnnnnnnnnnnnnnnnnnnnnnnnnnnnnnnnnnnnnnnnnnnnnnnnnnnnnnnnnnnnnnnnnnnnnnnnnnnnnnnnnnnnnnnnnnnnnnnnnnnnnnnnnnnnnnnnnnnnnnnnnnnnnnnnnnnnnnnnnnnnnnnnnnnnnnnnnnnnnnnnnnnnnnnnnnnnnnnnnnnnnnnnnnnnnnnnnnnnnnnnnnnnnnnnnnnnnnnnnnnnnnnnnnnnnnnnnnnnnnnnnnnnnnnnnnnnnnnnnnnnnnnnnnnnnnnnnnnnnnnnnnnnnnnnnnnnnnnnnnnnnnnnnnnnnnnnnnnnnnnnnnnnnnnnnnnnnnnnnnnnnnnnnnnnnnnnnnnnnnnnnnnnnnnnnnnnnnnnnnnnnnnnnnnnnnnnnnnnnnnnnnnnnnnnnnnnnnnnnnnnnnnnnnnnnnnnnnnnnnnnnnnnnnnnnnnnnnnnnnnnnnnnnnnnnnnnnnnnnnnnnnnnnnnnnnnnnnnnnnnnnnnnnnnnnnnnnnnnnnnnnnnnnnnnnnnnnnnnnnnnnnnnnnnnnnnnnnnnnnnnnnnnnnnnnnnnnnnnnnnnnnnnnnnnnnnnnnnnnnnnnnnnnnnnnnnnnnnnnnnnnnnnnnnnnnnnnnnnnnnnnnnnnnnnnnnnnnnnnnnnnnnnnnnnnnnnnnnnnnnnnnnnnnnnnnnnnnnnnnnnnnnnnnnnnnnnnnnnnnnnnnnnnnnnnnnnnnnnnnnnnnnnnnnnnnnnnnnnnnnnnnnnnnnnnnnnnnnnnnnnnnnnnnnnnnnnnnnnnnnnnnnnnnnnnnnnnnnnnnnnnnnnnnnnnnnnnnnnnnnnnnnnnnnnnnnnnnnnnnnnnnnnnnnnnnnnnnnnnnnnnnnnnnnnnnnnnnnnnnnnnnnnnnnnnnnnnnnnnnnnnnnnnnnnnnnnnnnnnnnnnnnnnnnnnnnnnnnnnnnnnnnnnnnnnnnnnnnnnnnnnnnnnnnnnnnnnnnnnnnnnnnnnnnnnnnnnnnnnnnnnnnnnnnnnnnnnnnnnnnnnnnnnnnnnnnnnnnnnnnnnnnnnnnnnnnnnnnnnnnnnnnnnnnnnnnnnnnnnnnnnnnnnnnnnnnnnnnnnnnnnnnnnnnnnnnnnnnnnnnnnnnnnnnnnnnnnnnnnnnnnnnnnnnnnnnnnnnnnnnnnnnnnnnnnnnnnnnnnnnnnnnnnnnnnnnnnnnnnnnnnnnnnnnnnnnnnnnnnnnnnnnnnnnnnnnnnnnnnnnnnnnnnnnnnnnnnnnnnnnnnnnnnnnnnnnnnnnnnnnnnnnnnnnnnnnnnnnnnnnnnnnnnnnnnnnnnnnnnnnnnnnnnnnnnnnnnnnnnnnnnnnnnnnnnnnnnnnnnnnnnnnnnnnnnnnnnnnnnnnnnnnnnnnnnnnnnnnnnnnnnnnnnnnnnnnnnnnnnnnnnnnnnnnnnnnnnnnnnnnnnnnnnnnnnnnnnnnnnnnnnnnnnnnnnnnnnnnnnnnnnnnnnnnnnnnnnnnnnnnnnnnnnnnnnnnnnnnnnnnnnnnnnnnnnnnnnnnnnnnnnnnnnnnnnnnnnnnnnnnnnnnnnnnnnnnnnnnnnnnnnnnnnnnnnnnnnnnnnnnnnnnnnnnnnnnnnnnnnnnnnnnnnnnnnnnnnnnnnnnnnnnnnnnnnnnnnnnnnnnnnnnnnnnnnnnnnnnnnnnnnnnnnnnnnnnnnnnnnnnnnnnnnnnnnnnnnnnnnnnnnnnnnnnnnnnnnnnnnnnnnnnnnnnnnnnnnnnnnnnnnnnnnnnnnnnnnnnnnnnnnnnnnnnnnnnnnnnnnnnnnnnnnnnnnnnnnnnnnnnnnnnnnnnnnnnnnnnnnnnnnnnnnnnnnnnnnnnnnnnnnnnnnnnnnnnnnnnnnnnnnnnnnnnnnnnnnnnnnnnnnnnnnnnnnnnnnnnnnnnnnnnnnnnnnnnnnnnnnnnnnnnnnnnnnnnnnnnnnnnnnnnnnnnnnnnnnnnnnnnnnnnnnnnnnnnnnnnnnnnnnnnnnnnnnnnnnnnnnnnnnnnnnnnnnnnnnnnnnnnnnnnnnnnnnnnnnnnnnnnnnnnnnnnnnnnnnnnnnnnnnnnnnnnnnnnnnnnnnnnnnnnnnnnnnnnnnnnnnnnnnnnnnnnnnnnnnnnnnnnnnnnnnnnnnnnnnnnnnnnnnnnnnnnnnnnnnnnnnnnnnnnnnnnnnnnnnnnnnnnnnnnnnnnnnnnnnnnnnnnnnnnnnnnnnnnnnnnnnnnnnnnnnnnnnnnnnnnnnnnnnnnnnnnnnnnnnnnnnnnnnnnnnnnnnnnnnnnnnnnnnnnnnnnnnnnnnnnnnnnnnnnnnnnnnnnnnnnnnnnnnnnnnnnnnnnnnnnnnnnnnnnnnnnnnnnnnnnnnnnnnnnnnnnnnnnnnnnnnnnnnnnnnnnnnnnnnnnnnnnnnnnnnnnnnnnnnnnnnnnnnnnnnnnnnnnnnnnnnnnnnnnnnnnnnnnnnnnnnnnnnnnnnnnnnnnnnnnnnnnnnnnnnnnnnnnnnnnnnnnnnnnnnnnnnnnnnnnnnnnnnnnnnnnnnnnnnnnnnnnnnnnnnnnnnnnnnnnnnnnnnnnnnnnnnnnnnnnnnnnnnnnnnnnnnnnnnnnnnnnnnnnnnnnnnnnnnnnnnnnnnnnnnnnnnnnnnnnnnnnnnnnnnnnnnnnnnnnnnnnnnnnnnnnnnnnnnnnnnnnnnnnnnnnnnnnnnnnnnnnnnnnnnnnnnnnnnnnnnnnnnnnnnnnnnnnnnnnnnnnnnnnnnnnnnnnnnnnnnnnnnnnnnnnnnnnnnnnnnnnnnnnnnnnnnnnnnnnnnnnnnnnnnnnnnnnnnnnnnnnnnnnnnnnnnnnnnnnnnnnnnnnnnnnnnnnnnnnnnnnnnnnnnnnnnnnnnnnnnnnnnnnnnnnnnnnnnnnnnnnnnnnnnnnnnnnnnnnnnnnnnnnnnnnnnnnnnnnnnnnnnnnnnnnnnnnnnnnnnnnnnnnnnnnnnnnnnnnnnnnnnnnnnnnnnnnnnnnnnnnnnnnnnnnnnnnnnnnnnnnnnnnnnnnnnnnnnnnnnnnnnnnnnnnnnnnnnnnnnnnnnnnnnnnnnnnnnnnnnnnnnnnnnnnnnnnnnnnnnnnnnnnnnnnnnnnnnnnnnnnnnnnnnnnnnnnnnnnnnnnnnnnnnnnnnnnnnnnnnnnnnnnnnnnnnnnnnnnnnnnnnnnnnnnnnnnnnnnnnnnnnnnnnnnnnnnnnnnnnnnnnnnnnnnnnnnnnnnnnnnnnnnnnnnnnnnnnnnnnnnnnnnnnnnnnnnnnnnnnnnnnnnnnnnnnnnnnnnnnnnnnnnnnnnnnnnnnnnnnnnnnnnnnnnnnnnnnnnnnnnnnnnnnnnnnnnnnnnnnnnnnnnnnnnnnnnnnnnnnnnnnnnnnnnnnnnnnnnnnnnnnnnnnnnnnnnnnnnnnnnnnnnnnnnnnnnnnnnnnnnnnnnnnnnnnnnnnnnnnnnnnnnnnnnnnnnnnnnnnnnnnnnnnnnnnnnnnnnnnnnnnnnnnnnnnnnnnnnnnnnnnnnnnnnnnnnnnnnnnnnnnnnnnnnnnnnnnnnnnnnnnnnnnnnnnnnnnnnnnnnnnnnnnnnnnnnnnnnnnnnnnnnnnnnnnnnnnnnnnnnnnnnnnnnnnnnnnnnnnnnnnnnnnnnnnnnnnnnnnnnnnnnnnnnnnnnnnnnnnnnnnnnnnnnnnnnnnnnnnnnnnnnnnnnnnnnnnnnnnnnnnnnnnnnnnnnnnnnnnnnnnnnnnnnnnnnnnnnnnnnnnnnnnnnnnnnnnnnnnnnnnnnnnnnnnnnnnnnnnnnnnnnnnnnnnnnnnnnnnnnnnnnnnnnnnnnnnnnnnnnnnnnnnnnnnnnnnnnnnnnnnnnnnnnnnnnnnnnnnnnnnnnnnnnnnnnnnnnnnnnnnnnnnnnnnnnnnnnnnnnnnnnnnnnnnnnnnnnnnnnnnnnnnnnnnnnnnnnnnnnnnnnnnnnnnnnnnnnnnnnnnnnnnnnnnnnnnnnnnnnnnnnnnnnnnnnnnnnnnnnnnnnnnnnnnnnnnnnnnnnnnnnnnnnnnnnnnnnnnnnnnnnnnnnnnnnnnnnnnnnnnnnnnnnnnnnnnnnnnnnnnnnnnnnnnnnnnnnnnnnnnnnnnnnnnnnnnnnnnnnnnnnnnnnnnnnnnnnnnnnnnnnnnnnnnnnnnnnnnnnnnnnnnnnnnnnnnnnnnnnnnnnnnnnnnnnnnnnnnnnnnnnnnnnnnnnnnnnnnnnnnnnnnnnnnnnnnnnnnnnnnnnnnnnnnnnnnnnnnnnnnnnnnnnnnnnnnnnnnnnnnnnnnnnnnnnnnnnnnnnnnnnnnnnnnnnnnnnnnnnnnnnnnnnnnnnnnnnnnnnnnnnnnnnnnnnnnnnnnnnnnnnnnnnnnnnnnnnnnnnnnnnnnnnnnnnnnnnnnnnnnnnnnnnnnnnnnnnnnnnnnnnnnnnnnnnnnnnnnnnnnnnnnnnnnnnnnnnnnnnnnnnnnnnnnnnnnnnnnnnnnnnnnnnnnnnnnnnnnnnnnnnnnnnnnnnnnnnnnnnnnnnnnnnnnnnnnnnnnnnnnnnnnnnnnnnnnnnnnnnnnnnnnnnnnnnnnnnnnnnnnnnnnnnnnnnnnnnnnnnnnnnnnnnnnnnnnnnnnnnnnnnnnnnnnnnnnnnnnnnnnnnnnnnnnnnnnnnnnnnnnnnnnnnnnnnnnnnnnnnnnnnnnnnnnnnnnnnnnnnnnnnnnnnnnnnnnnnnnnnnnnnnnnnnnnnnnnnnnnnnnnnnnnnnnnnnnnnnnnnnnnnnnnnnnnnnnnnnnnnnnnnnnnnnnnnnnnnnnnnnnnnnnnnnnnnnnnnnnnnnnnnnnnnnnnnnnnnnnnnnnnnnnnnnnnnnnnnnnnnnnnnnnnnnnnnnnnnnnnnnnnnnnnnnnnnnnnnnnnnnnnnnnnnnnnnnnnnnnnnnnnnnnnnnnnnnnnnnnnnnnnnnnnnnnnnnnnnnnnnnnnnnnnnnnnnnnnnnnnnnnnnnnnnnnnnnnnnnnnnnnnnnnnnnnnnnnnnnnnnnnnnnnnnnnnnnnnnnnnnnnnnnnnnnnnnnnnnnnnnnnnnnnnnnnnnnnnnnnnnnnnnnnnnnnnnnnnnnnnnnnnnnnnnnnnnnnnnnnnnnnnnnnnnnnnnnnnnnnnnnnnnnnnnnnnnnnnnnnnnnnnnnnnnnnnnnnnnnnnnnnnnnnnnnnnnnnnnnnnnnnnnnnnnnnnnnnnnnnnnnnnnnnnnnnnnnnnnnnnnnnnnnnnnnnnnnnnnnnnnnnnnnnnnnnnnnnnnnnnnnnnnnnnnnnnnnnnnnnnnnnnnnnnnnnnnnnnnnnnnnnnnnnnnnnnnnnnnnnnnnnnnnnnnnnnnnnnnnnnnnnnnnnnnnnnnnnnnnnnnnnnnnnnnnnnnnnnnnnnnnnnnnnnnnnnnnnnnnnnnnnnnnnnnnnnnnnnnnnnnnnnnnnnnnnnnnnnnnnnnnnnnnnnnnnnnnnnnnnnnnnnnnnnnnnnnnnnnnnnnnnnnnnnnnnnnnnnnnnnnnnnnnnnnnnnnnnnnnnnnnnnnnnnnnnnnnnnnnnnnnnnnnnnnnnnnnnnnnnnnnnnnnnnnnnnnnnnnnnnnnnnnnnnnnnnnnnnnnnnnnnnnnnnnnnnnnnnnnnnnnnnnnnnnnnnnnnnnnnnnnnnnnnnnnnnnnnnnnnnnnnnnnnnnnnnnnnnnnnnnnnnnnnnnnnnnnnnnnnnnnnnnnnnnnnnnnnnnnnnnnnnnnnnnnnnnnnnnnnnnnnnnnnnnnnnnnnnnnnnnnnnnnnnnnnnnnnnnnnnnnnnnnnnnnnnnnnnnnnnnnnnnnnnnnnnnnnnnnnnnnnnnnnnnnnnnnnnnnnnnnnnnnnnnnnnnnnnnnnnnnnnnnnnnnnnnnnnnnnnnnnnnnnnnnnnnnnnnnnnnnnnnnnnnnnnnnnnnnnnnnnnnnnnnnnnnnnnnnnnnnnnnnnnnnnnnnnnnnnnnnnnnnnnnnnnnnnnnnnnnnnnnnnnnnnnnnnnnnnnnnnnnnnnnnnnnnnnnnnnnnnnnnnnnnnnnnnnnnnnnnnnnnnnnnnnnnnnnnnnnnnnnnnnnnnnnnnnnnnnnnnnnnnnnnnnnnnnnnnnnnnnnnnnnnnnnnnnnnnnnnnnnnnnnnnnnnnnnnnnnnnnnnnnnnnnnnnnnnnnnnnnnnnnnnnnnnnnnnnnnnnnnnnnnnnnnnnnnnnnnnnnnnnnnnnnnnnnnnnnnnnnnnnnnnnnnnnnnnnnnnnnnnnnnnnnnnnnnnnnnnnnnnnnnnnnnnnnnnnnnnnnnnnnnnnnnnnnnnnnnnnnnnnnnnnnnnnnnnnnnnnnnnnnnnnnnnnnnnnnnnnnnnnnnnnnnnnnnnnnnnnnnnnnnnnnnnnnnnnnnnnnnnnnnnnnnnnnnnnnnnnnnnnnnnnnnnnnnnnnnnnnnnnnnnnnnnnnnnnnnnnnnnnnnnnnnnnnnnnnnnnnnnnnnnnnnnnnnnnnnnnnnnnnnnnnnnnnnnnnnnnnnnnnnnnnnnnnnnnnnnnnnnnnnnnnnnnnnnnnnnnnnnnnnnnnnnnnnnnnnnnnnnnnnnnnnnnnnnnnnnnnnnnnnnnnnnnnnnnnnnnnnnnnnnnnnnnnnnnnnnnnnnnnnnnnnnnnnnnnnnnnnnnnnnnnnnnnnnnnnnnnnnnnnnnnnnnnnnnnnnnnnnnnnnnnnnnnnnnnnnnnnnnnnnnnnnnnnnnnnnnnnnnnnnnnnnnnnnnnnnnnnnnnnnnnnnnnnnnnnnnnnnnnnnnnnnnnnnnnnnnnnnnnnnnnnnnnnnnnnnnnnnnnnnnnnnnnnnnnnnnnnnnnnnnnnnnnnnnnnnnnnnnnnnnnnnnnnnnnnnnnnnnnnnnnnnnnnnnnnnnnnnnnnnnnnnnnnnnnnnnnnnnnnnnnnnnnnnnnnnnnnnnnnnnnnnnnnnnnnnnnnnnnnnnnnnnnnnnnnnnnnnnnnnnnnnnnnnnnnnnnnnnnnnnnnnnnnnnnnnnnnnnnnnnnnnnnnnnnnnnnnnnnnnnnnnnnnnnnnnnnnnnnnnnnnnnnnnnnnnnnnnnnnnnnnnnnnnnnnnnnnnnnnnnnnnnnnnnnnnnnnnnnnnnnnnnnnnnnnnnnnnnnnnnnnnnnnnnnnnnnnnnnnnnnnnnnnnnnnnnnnnnnnnnnnnnnnnnnnnnnnnnnnnnnnnnnnnnnnnnnnnnnnnnnnnnnnnnnnnnnnnnnnnnnnnnnnnnnnnnnnnnnnnnnnnnnnnnnnnnnnnnnnnnnnnnnnnnnnnnnnnnnnnnnnnnnnnnnnnnnnnnnnnnnnnnnnnnnnnnnnnnnnnnnnnnnnnnnnnnnnnnnnnnnnnnnnnnnnnnnnnnnnnnnnnnnnnnnnnnnnnnnnnnnnnnnnnnnnnnnnnnnnnnnnnnnnnnnnnnnnnnnnnnnnnnnnnnnnnnnnnnnnnnnnnnnnnnnnnnnnnnnnnnnnnnnnnnnnnnnnnnnnnnnnnnnnnnnnnnnnnnnnnnnnnnnnnnnnnnnnnnnnnnnnnnnnnnnnnnnnnnnnnnnnnnnnnnnnnnnnnnnnnnnnnnnnnnnnnnnnnnnnnnnnnnnnnnnnnnnnnnnnnnnnnnnnnnnnnnnnnnnnnnnnnnnnnnnnnnnnnnnnnnnnnnnnnnnnnnnnnnnnnnnnnnnnnnnnnnnnnnnnnnnnnnnnnnnnnnnnnnnnnnnnnnnnnnnnnnnnnnnnnnnnnnnnnnnnnnnnnnnnnnnnnnnnnnnnnnnnnnnnnnnnnnnnnnnnnnnnnnnnnnnnnnnnnnnnnnnnnnnnnnnnnnnnnnnnnnnnnnnnnnnnnnnnnnnnnnnnnnnnnnnnnnnnnnnnnnnnnnnnnnnnnnnnnnnnnnnnnnnnnnnnnnnnnnnnnnnnnnnnnnnnnnnnnnnnnnnnnnnnnnnnnnnnnnnnnnnnnnnnnnnnnnnnnnnnnnnnnnnnnnnnnnnnnnnnnnnnnnnnnnnnnnnnnnnnnnnnnnnnnnnnnnnnnnnnnnnnnnnnnnnnnnnnnnnnnnnnnnnnnnnnnnnnnnnnnnnnnnnnnnnnnnnnnnnnnnnnnnnnnnnnnnnnnnnnnnnnnnnnnnnnnnnnnnnnnnnnnnnnnnnnnnnnnnnnnnnnnnnnnnnnnnnnnnnnnnnnnnnnnnnnnnnnnnnnnnnnnnnnnnnnnnnnnnnnnnnnnnnnnnnnnnnnnnnnnnnnnnnnnnnnnnnnnnnnnnnnnnnnnnnnnnnnnnnnnnnnnnnnnnnnnnnnnnnnnnnnnnnnnnnnnnnnnnnnnnnnnnnnnnnnnnnnnnnnnnnnnnnnnnnnnnnnnnnnnnnnnnnnnnnnnnnnnnnnnnnnnnnnnnnnnnnnnnnnnnnnnnnnnnnnnnnnnnnnnnnnnnnnnnnnnnnnnnnnnnnnnnnnnnnnnnnnnnnnnnnnnnnnnnnnnnnnnnnnnnnnnnnnnnnnnnnnnnnnnnnnnnnnnnnnnnnnnnnnnnnnnnnnnnnnnnnnnnnnnnnnnnnnnnnnnnnnnnnnnnnnnnnnnnnnnnnnnnnnnnnnnnnnnnnnnnnnnnnnnnnnnnnnnnnnnnnnnnnnnnnnnnnnnnnnnnnnnnnnnnnnnnnnnnnnnnnnnnnnnnnnnnnnnnnnnnnnnnnnnnnnnnnnnnnnnnnnnnnnnnnnnnnnnnnnnnnnnnnnnnnnnnnnnnnnnnnnnnnnnnnnnnnnnnnnnnnnnnnnnnnnnnnnnnnnnnnnnnnnnnnnnnnnnnnnnnnnnnnnnnnnnnnnnnnnnnnnnnnnnnnnnnnnnnnnnnnnnnnnnnnnnnnnnnnnnnnnnnnnnnnnnnnnnnnnnnnnnnnnnnnnnnnnnnnnnnnnnnnnnnnnnnnnnnnnnnnnnnnnnnnnnnnnnnnnnnnnnnnnnnnnnnnnnnnnnnnnnnnnnnnnnnnnnnnnnnnnnnnnnnnnnnnnnnnnnnnnnnnnnnnnnnnnnnnnnnnnnnnnnnnnnnnnnnnnnnnnnnnnnnnnnnnnnnnnnnnnnnnnnnnnnnnnnnnnnnnnnnnnnnnnnnnnnnnnnnnnnnnnnnnnnnnnnnnnnnnnnnnnnnnnnnnnnnnnnnnnnnnnnnnnnnnnnnnnnnnnnnnnnnnnnnnnnnnnnnnnnnnnnnnnnnnnnnnnnnnnnnnnnnnnnnnnnnnnnnnnnnnnnnnnnnnnnnnnnnnnnnnnnnnnnnnnnnnnnnnnnnnnnnnnnnnnnnnnnnnnnnnnnnnnnnnnnnnnnnnnnnnnnnnnnnnnnnnnnnnnnnnnnnnnnnnnnnnnnnnnnnnnnnnnnnnnnnnnnnnnnnnnnnnnnnnnnnnnnnnnnnnnnnnnnnnnnnnnnnnnnnnnnnnnnnnnnnnnnnnnnnnnnnnnnnnnnnnnnnnnnnnnnnnnnnnnnnnnnnnnnnnnnnnnnnnnnnnnnnnnnnnnnnnnnnnnnnnnnnnnnnnnnnnnnnnnnnnnnnnnnnnnnnnnnnnnnnnnnnnnnnnnnnnnnnnnnnnnnnnnnnnnnnnnnnnnnnnnnnnnnnnnnnnnnnnnnnnnnnnnnnnnnnnnnnnnnnnnnnnnnnnnnnnnnnnnnnnnnnnnnnnnnnnnnnnnnnnnnnnnnnnnnnnnnnnnnnnnnnnnnnnnnnnnnnnnnnnnnnnnnnnnnnnnnnnnnnnnnnnnnnnnnnnnnnnnnnnnnnnnnnnnnnnnnnnnnnnnnnnnnnnnnnnnnnnnnnnnnnnnnnnnnnnnnnnnnnnnnnnnnnnnnnnnnnnnnnnnnnnnnnnnnnnnnnnnnnnnnnnnnnnnnnnnnnnnnnnnnnnnnnnnnnnnnnnnnnnnnnnnnnnnnnnnnnnnnnnnnnnnnnnnnnnnnnnnnnnnnnnnnnnnnnnnnnnnnnnnnnnnnnnnnnnnnnnnnnnnnnnnnnnnnnnnnnnnnnnnnnnnnnnnnnnnnnnnnnnnnnnnnnnnnnnnnnnnnnnnnnnnnnnnnnnnnnnnnnnnnnnnnnnnnnnnnnnnnnnnnnnnnnnnnnnnnnnnnnnnnnnnnnnnnnnnnnnnnnnnnnnnnnnnnnnnnnnnnnnnnnnnnnnnnnnnnnnnnnnnnnnnnnnnnnnnnnnnnnnnnnnnnnnnnnnnnnnnnnnnnnnnnnnnnnnnnnnnnnnnnnnnnnnnnnnnnnnnnnnnnnnnnnnnnnnnnnnnnnnnnnnnnnnnnnnnnnnnnnnnnnnnnnnnnnnnnnnnnnnnnnnnnnnnnnnnnnnnnnnnnnnnnnnnnnnnnnnnnnnnnnnnnnnnnnnnnnnnnnnnnnnnnnnnnnnnnnnnnnnnnnnnnnnnnnnnnnnnnnnnnnnnnnnnnnnnnnnnnnnnnnnnnnnnnnnnnnnnnnnnnnnnnnnnnnnnnnnnnnnnnnnnnnnnnnnnnnnnnnnnnnnnnnnnnnnnnnnnnnnnnnnnnnnnnnnnnnnnnnnnnnnnnnnnnnnnnnnnnnnnnnnnnnnnnnnnnnnnnnnnnnnnnnnnnnnnnnnnnnnnnnnnnnnnnnnnnnnnnnnnnnnnnnnnnnnnnnnnnnnnnnnnnnnnnnnnnnnnnnnnnnnnnnnnnnnnnnnnnnnnnnnnnnnnnnnnnnnnnnnnnnnnnnnnnnnnnnnnnnnnnnnnnnnnnnnnnnnnnnnnnnnnnnnnnnnnnnnnnnnnnnnnnnnnnnnnnnnnnnnnnnnnnnnnnnnnnnnnnnnnnnnnnnnnnnnnnnnnnnnnnnnnnnnnnnnnnnnnnnnnnnnnnnnnnnnnnnnnnnnnnnnnnnnnnnnnnnnnnnnnnnnnnnnnnnnnnnnnnnnnnnnnnnnnnnnnnnnnnnnnnnnnnnnnnnnnnnnnnnnnnnnnnnnnnnnnnnnnnnnnnnnnnnnnnnnnnnnnnnnnnnnnnnnnnnnnnnnnnnnnnnnnnnnnnnnnnnnnnnnnnnnnnnnnnnnnnnnnnnnnnnnnnnnnnnnnnnnnnnnnnnnnnnnnnnnnnnnnnnnnnnnnnnnnnnnnnnnnnnnnnnnnnnnnnnnnnnnnnnnnnnnnnnnnnnnnnnnnnnnnnnnnnnnnnnnnnnnnnnnnnnnnnnnnnnnnnnnnnnnnnnnnnnnnnnnnnnnnnnnnnnnnnnnnnnnnnnnnnnnnnnnnnnnnnnnnnnnnnnnnnnnnnnnnnnnnnnnnnnnnnnnnnnnnnnnnnnnnnnnnnnnnnnnnnnnnnnnnnnnnnnnnnnnnnnnnnnnnnnnnnnnnnnnnnnnnnnnnnnnnnnnnnnnnnnnnnnnnnnnnnnnnnnnnnnnnnnnnnnnnnnnnnnnnnnnnnnnnnnnnnnnnnnnnnnnnnnnnnnnnnnnnnnnnnnnnnnnnnnnnnnnnnnnnnnnnnnnnnnnnnnnnnnnnnnnnnnnnnnnnnnnnnnnnnnnnnnnnnnnnnnnnnnnnnnnnnnnnnnnnnnnnnnnnnnnnnnnnnnnnnnnnnnnnnnnnnnnnnnnnnnnnnnnnnnnnnnnnnnnnnnnnnnnnnnnnnnnnnnnnnnnnnnnnnnnnnnnnnnnnnnnnnnnnnnnnnnnnnnnnnnnnnnnnnnnnnnnnnnnnnnnnnnnnnnnnnnnnnnnnnnnnnnnnnnnnnnnnnnnnnnnnnnnnnnnnnnnnnnnnnnnnnnnnnnnnnnnnnnnnnnnnnnnnnnnnnnnnnnnnnnnnnnnnnnnnnnnnnnnnnnnnnnnnnnnnnnnnnnnnnnnnnnnnnnnnnnnnnnnnnnnnnnnnnnnnnnnnnnnnnnnnnnnnnnnnnnnnnnnnnnnnnnnnnnnnnnnnnnnnnnnnnnnnnnnnnnnnnnnnnnnnnnnnnnnnnnnnnnnnnnnnnnnnnnnnnnnnnnnnnnnnnnnnnnnnnnnnnnnnnnnnnnnnnnnnnnnnnnnnnnnnnnnnnnnnnnnnnnnnnnnnnnnnnnnnnnnnnnnnnnnnnnnnnnnnnnnnnnnnnnnnnnnnnnnnnnnnnnnnnnnnnnnnnnnnnnnnnnnnnnnnnnnnnnnnnnnnnnnnnnnnnnnnnnnnnnnnnnnnnnnnnnnnnnnnnnnnnnnnnnnnnnnnnnnnnnnnnnnnnnnnnnnnnnnnnnnnnnnnnnnnnnnnnnnnnnnnnnnnnnnnnnnnnnnnnnnnnnnnnnnnnnnnnnnnnnnnnnnnnnnnnnnnnnnnnnnnnnnnnnnnnnnnnnnnnnnnnnnnnnnnnnnnnnnnnnnnnnnnnnnnnnnnnnnnnnnnnnnnnnnnnnnnnnnnnnnnnnnnnnnnnnnnnnnnnnnnnnnnnnnnnnnnnnnnnnnnnnnnnnnnnnnnnnnnnnnnnnnnnnnnnnnnnnnnnnnnnnnnnnnnnnnnnnnnnnnnnnnnnnnnnnnnnnnnnnnnnnnnnnnnnnnnnnnnnnnnnnnnnnnnnnnnnnnnnnnnnnnnnnnnnnnnnnnnnnnnnnnnnnnnnnnnnnnnnnnnnnnnnnnnnnnnnnnnnnnnnnnnnnnnnnnnnnnnnnnnnnnnnnnnnnnnnnnnnnnnnnnnnnnnnnnnnnnnnnnnnnnnnnnnnnnnnnnnnnnnnnnnnnnnnnnnnnnnnnnnnnnnnnnnnnnnnnnnnnnnnnnnnnnnnnnnnnnnnnnnnnnnnnnnnnnnnnnnnnnnnnnnnnnnnnnnnnnnnnnnnnnnnnnnnnnnnnnnnnnnnnnnnnnnnnnnnnnnnnnnnnnnnnnnnnnnnnnnnnnnnnnnnnnnnnnnnnnnnnnnnnnnnnnnnnnnnnnnnnnnnnnnnnnnnnnnnnnnnnnnnnnnnnnnnnnnnnnnnnnnnnnnnnnnnnnnnnnnnnnnnnnnnnnnnnnnnnnnnnnnnnnnnnnnnnnnnnnnnnnnnnnnnnnnnnnnnnnnnnnnnnnnnnnnnnnnnnnnnnnnnnnnnnnnnnnnnnnnnnnnnnnnnnnnnnnnnnnnnnnnnnnnnnnnnnnnnnnnnnnnnnnnnnnnnnnnnnnnnnnnnnnnnnnnnnnnnnnnnnnnnnnnnnnnnnnnnnnnnnnnnnnnnnnnnnnnnnnnnnnnnnnnnnnnnnnnnnnnnnnnnnnnnnnnnnnnnnnnnnnnnnnnnnnnnnnnnnnnnnnnnnnnnnnnnnnnnnnnnnnnnnnnnnnnnnnnnnnnnnnnnnnnnnnnnnnnnnnnnnnnnnnnnnnnnnnnnnnnnnnnnnnnnnnnnnnnnnnnnnnnnnnnnnnnnnnnnnnnnnnnnnnnnnnnnnnnnnnnnnnnnnnnnnnnnnnnnnnnnnnnnnnnnnnnnnnnnnnnnnnnnnnnnnnnnnnnnnnnnnnnnnnnnnnnnnnnnnnnnnnnnnnnnnnnnnnnnnnnnnnnnnnnnnnnnnnnnnnnnnnnnnnnnnnnnnnnnnnnnnnnnnnnnnnnnnnnnnnnnnnnnnnnnnnnnnnnnnnnnnnnnnnnnnnnnnnnnnnnnnnnnnnnnnnnnnnnnnnnnnnnnnnnnnnnnnnnnnnnnnnnnnnnnnnnnnnnnnnnnnnnnnnnnnnnnnnnnnnnnnnnnnnnnnnnnnnnnnnnnnnnnnnnnnnnnnnnnnnnnnnnnnnnnnnnnnnnnnnnnnnnnnnnnnnnnnnnnnnnnnnnnnnnnnnnnnnnnnnnnnnnnnnnnnnnnnnnnnnnnnnnnnnnnnnnnnnnnnnnnnnnnnnnnnnnnnnnnnnnnnnnnnnnnnnnnnnnnnnnnnnnnnnnnnnnnnnnnnnnnnnnnnnnnnnnnnnnnnnnnnnnnnnnnnnnnnnnnnnnnnnnnnnnnnnnnnnnnnnnnnnnnnnnnnnnnnnnnnnnnnnnnnnnnnnnnnnnnnnnnnnnnnnnnnnnnnnnnnnnnnnnnnnnnnnnnnnnnnnnnnnnnnnnnnnnnnnnnnnnnnnnnnnnnnnnnnnnnnnnnnnnnnnnnnnnnnnnnnnnnnnnnnnnnnnnnnnnnnnnnnnnnnnnnnnnnnnnnnnnnnnnnnnnnnnnnnnnnnnnnnnnnnnnnnnnnnnnnnnnnnnnnnnnnnnnnnnnnnnnnnnnnnnnnnnnnnnnnnnnnnnnnnnnnnnnnnnnnnnnnnnnnnnnnnnnnnnnnnnnnnnnnnnnnnnnnnnnnnnnnnnnnnnnnnnnnnnnnnnnnnnnnnnnnnnnnnnnnnnnnnnnnnnnnnnnnnnnnnnnnnnnnnnnnnnnnnnnnnnnnnnnnnnnnnnnnnnnnnnnnnnnnnnnnnnnnnnnnnnnnnnnnnnnnnnnnnnnnnnnnnnnnnnnnnnnnnnnnnnnnnnnnnnnnnnnnnnnnnnnnnnnnnnnnnnnnnnnnnnnnnnnnnnnnnnnnnnnnnnnnnnnnnnnnnnnnnnnnnnnnnnnnnnnnnnnnnnnnnnnnnnnnnnnnnnnnnnnnnnnnnnnnnnnnnnnnnnnnnnnnnnnnnnnnnnnnnnnnnnnnnnnnnnnnnnnnnnnnnnnnnnnnnnnnnnnnnnnnnnnnnnnnnnnnnnnnnnnnnnnnnnnnnnnnnnnnnnnnnnnnnnnnnnnnnnnnnnnnnnnnnnnnnnnnnnnnnnnnnnnnnnnnnnnnnnnnnnnnnnnnnnnnnnnnnnnnnnnnnnnnnnnnnnnnnnnnnnnnnnnnnnnnnnnnnnnnnnnnnnnnnnnnnnnnnnnnnnnnnnnnnnnnnnnnnnnnnnnnnnnnnnnnnnnnnnnnnnnnnnnnnnnnnnnnnnnnnnnnnnnnnnnnnnnnnnnnnnnnnnnnnnnnnnnnnnnnnnnnnnnnnnnnnnnnnnnnnnnnnnnnnnnnnnnnnnnnnnnnnnnnnnnnnnnnnnnnnnnnnnnnnnnnnnnnnnnnnnnnnnnnnnnnnnnnnnnnnnnnnnnnnnnnnnnnnnnnnnnnnnnnnnnnnnnnnnnnnnnnnnnnnnnnnnnnnnnnnnnnnnnnnnnnnnnnnnnnnnnnnnnnnnnnnnnnnnnnnnnnnnnnnnnnnnnnnnnnnnnnnnnnnnnnnnnnnnnnnnnnnnnnnnnnnnnnnnnnnnnnnnnnnnnnnnnnnnnnnnnnnnnnnnnnnnnnnnnnnnnnnnnnnnnnnnnnnnnnnnnnnnnnnnnnnnnnnnnnnnnnnnnnnnnnnnnnnnnnnnnnnnnnnnnnnnnnnnnnnnnnnnnnnnnnnnnnnnnnnnnnnnnnnnnnnnnnnnnnnnnnnnnnnnnnnnnnnnnnnnnnnnnnnnnnnnnnnnnnnnnnnnnnnnnnnnnnnnnnnnnnnnnnnnnnnnnnnnnnnnnnnnnnnnnnnnnnnnnnnnnnnnnnnnnnnnnnnnnnnnnnnnnnnnnnnnnnnnnnnnnnnnnnnnnnnnnnnnnnnnnnnnnnnnnnnnnnnnnnnnnnnnnnnnnnnnnnnnnnnnnnnnnnnnnnnnnnnnnnnnnnnnnnnnnnnnnnnnnnnnnnnnnnnnnnnnnnnnnnnnnnnnnnnnnnnnnnnnnnnnnnnnnnnnnnnnnnnnnnnnnnnnnnnnnnnnnnnnnnnnnnnnnnnnnnnnnnnnnnnnnnnnnnnnnnnnnnnnnnnnnnnnnnnnnnnnnnnnnnnnnnnnnnnnnnnnnnnnnnnnnnnnnnnnnnnnnnnnnnnnnnnnnnnnnnnnnnnnnnnnnnnnnnnnnnnnnnnnnnnnnnnnnnnnnnnnnnnnnnnnnnnnnnnnnnnnnnnnnnnnnnnnnnnnnnnnnnnnnnnnnnnnnnnnnnnnnnnnnnnnnnnnnnnnnnnnnnnnnnnnnnnnnnnnnnnnnnnnnnnnnnnnnnnnnnnnnnnnnnnnnnnnnnnnnnnnnnnnnnnnnnnnnnnnnnnnnnnnnnnnnnnnnnnnnnnnnnnnnnnnnnnnnnnnnnnnnnnnnnnnnnnnnnnnnnnnnnnnnnnnnnnnnnnnnnnnnnnnnnnnnnnnnnnnnnnnnnnnnnnnnnnnnnnnnnnnnnnnnnnnnnnnnnnnnnnnnnnnnnnnnnnnnnnnnnnnnnnnnnnnnnnnnnnnnnnnnnnnnnnnnnnnnnnnnnnnnnnnnnnnnnnnnnnnnnnnnnnnnnnnnnnnnnnnnnnnnnnnnnnnnnnnnnnnnnnnnnnnnnnnnnnnnnnnnnnnnnnnnnnnnnnnnnnnnnnnnnnnnnnnnnnnnnnnnnnnnnnnnnnnnnnnnnnnnnnnnnnnnnnnnnnnnnnnnnnnnnnnnnnnnnnnnnnnnnnnnnnnnnnnnnnnnnnnnnnnnnnnnnnnnnnnnnnnnnnnnnnnnnnnnnnnnnnnnnnnnnnnnnnnnnnnnnnnnnnnnnnnnnnnnnnnnnnnnnnnnnnnnnnnnnnnnnnnnnnnnnnnnnnnnnnnnnnnnnnnnnnnnnnnnnnnnnnnnnnnnnnnnnnnnnnnnnnnnnnnnnnnnnnnnnnnnnnnnnnnnnnnnnnnnnnnnnnnnnnnnnnnnnnnnnnnnnnnnnnnnnnnnnnnnnnnnnnnnnnnnnnnnnnnnnnnnnnnnnnnnnnnnnnnnnnnnnnnnnnnnnnnnnnnnnnnnnnnnnnnnnnnnnnnnnnnnnnnnnnnnnnnnnnnnnnnnnnnnnnnnnnnnnnnnnnnnnnnnnnnnnnnnnnnnnnnnnnnnnnnnnnnnnnnnnnnnnnnnnnnnnnnnnnnnnnnnnnnnnnnnnnnnnnnnnnnnnnnnnnnnnnnnnnnnnnnnnnnnnnnnnnnnnnnnnnnnnnnnnnnnnnnnnnnnnnnnnnnnnnnnnnnnnnnnnnnnnnnnnnnnnnnnnnnnnnnnnnnnnnnnnnnnnnnnnnnnnnnnnnnnnnnnnnnnnnnnnnnnnnnnnnnnnnnnnnnnnnnnnnnnnnnnnnnnnnnnnnnnnnnnnnnnnnnnnnnnnnnnnnnnnnnnnnnnnnnnnnnnnnnnnnnnnnnnnnnnnnnnnnnnnnnnnnnnnnnnnnnnnnnnnnnnnnnnnnnnnnnnnnnnnnnnnnnnnnnnnnnnnnnnnnnnnnnnnnnnnnnnnnnnnnnnnnnnnnnnnnnnnnnnnnnnnnnnnnnnnnnnnnnnnnnnnnnnnnnnnnnnnnnnnnnnnnnnnnnnnnnnnnnnnnnnnnnnnnnnnnnnnnnnnnnnnnnnnnnnnnnnnnnnnnnnnnnnnnnnnnnnnnnnnnnnnnnnnnnnnnnnnnnnnnnnnnnnnnnnnnnnnnnnnnnnnnnnnnnnnnnnnnnnnnnnnnnnnnnnnnnnnnnnnnnnnnnnnnnnnnnnnnnnnnnnnnnnnnnnnnnnnnnnnnnnnnnnnnnnnnnnnnnnnnnnnnnnnnnnnnnnnnnnnnnnnnnnnnnnnnnnnnnnnnnnnnnnnnnnnnnnnnnnnnnnnnnnnnnnnnnnnnnnnnnnnnnnnnnnnnnnnnnnnnnnnnnnnnnnnnnnnnnnnnnnnnnnnnnnnnnnnnnnnnnnnnnnnnnnnnnnnnnnnnnnnnnnnnnnnnnnnnnnnnnnnnnnnnnnnnnnnnnnnnnnnnnnnnnnnnnnnnnnnnnnnnnnnnnnnnnnnnnnnnnnnnnnnnnnnnnnnnnnnnnnnnnnnnnnnnnnnnnnnnnnnnnnnnnnnnnnnnnnnnnnnnnnnnnnnnnnnnnnnnnnnnnnnnnnnnnnnnnnnnnnnnnnnnnnnnnnnnnnnnnnnnnnnnnnnnnnnnnnnnnnnnnnnnnnnnnnnnnnnnnnnnnnnnnnnnnnnnnnnnnnnnnnnnnnnnnnnnnnnnnnnnnnnnnnnnnnnnnnnnnnnnnnnnnnnnnnnnnnnnnnnnnnnnnnnnnnnnnnnnnnnnnnnnnnnnnnnnnnnnnnnnnnnnnnnnnnnnnnnnnnnnnnnnnnnnnnnnnnnnnnnnnnnnnnnnnnnnnnnnnnnnnnnnnnnnnnnnnnnnnnnnnnnnnnnnnnnnnnnnnnnnnnnnnnnnnnnnnnnnnnnnnnnnnnnnnnnnnnnnnnnnnnnnnnnnnnnnnnnnnnnnnnnnnnnnnnnnnnnnnnnnnnnnnnnnnnnnnnnnnnnnnnnnnnnnnnnnnnnnnnnnnnnnnnnnnnnnnnnnnnnnnnnnnnnnnnnnnnnnnnnnnnnnnnnnnnnnnnnnnnnnnnnnnnnnnnnnnnnnnnnnnnnnnnnnnnnnnnnnnnnnnnnnnnnnnnnnnnnnnnnnnnnnnnnnnnnnnnnnnnnnnnnnnnnnnnnnnnnnnnnnnnnnnnnnnnnnnnnnnnnnnnnnnnnnnnnnnnnnnnnnnnnnnnnnnnnnnnnnnnnnnnnnnnnnnnnnnnnnnnnnnnnnnnnnnnnnnnnnnnnnnnnnnnnnnnnnnnnnnnnnnnnnnnnnnnnnnnnnnnnnnnnnnnnnnnnnnnnnnnnnnnnnnnnnnnnnnnnnnnnnnnnnnnnnnnnnnnnnnnnnnnnnnnnnnnnnnnnnnnnnnnnnnnnnnnnnnnnnnnnnnnnnnnnnnnnnnnnnnnnnnnnnnnnnnnnnnnnnnnnnnnnnnnnnnnnnnnnnnnnnnnnnnnnnnnnnnnnnnnnnnnnnnnnnnnnnnnnnnnnnnnnnnnnnnnnnnnnnnnnnnnnnnnnnnnnnnnnnnnnnnnnnnnnnnnnnnnnnnnnnnnnnnnnnnnnnnnnnnnnnnnnnnnnnnnnnnnnnnnnnnnnnnnnnnnnnnnnnnnnnnnnnnnnnnnnnnnnnnnnnnnnnnnnnnnnnnnnnnnnnnnnnnnnnnnnnnnnnnnnnnnnnnnnnnnnnnnnnnnnnnnnnnnnnnnnnnnnnnnnnnnnnnnnnnnnnnnnnnnnnnnnnnnnnnnnnnnnnnnnnnnnnnnnnnnnnnnnnnnnnnnnnnnnnnnnnnnnnnnnnnnnnnnnnnnnnnnnnnnnnnnnnnnnnnnnnnnnnnnnnnnnnnnnnnnnnnnnnnnnnnnnnnnnnnnnnnnnnnnnnnnnnnnnnnnnnnnnnnnnnnnnnnnnnnnnnnnnnnnnnnnnnnnnnnnnnnnnnnnnnnnnnnnnnnnnnnnnnnnnnnnnnnnnnnnnnnnnnnnnnnnnnnnnnnnnnnnnnnnnnnnnnnnnnnnnnnnnnnnnnnnnnnnnnnnnnnnnnnnnnnnnnnnnnnnnnnnnnnnnnnnnnnnnnnnnnnnnnnnnnnnnnnnnnnnnnnnnnnnnnnnnnnnnnnnnnnnnnnnnnnnnnnnnnnnnnnnnnnnnnnnnnnnnnnnnnnnnnnnnnnnnnnnnnnnnnnnnnnnnnnnnnnnnnnnnnnnnnnnnnnnnnnnnnnnnnnnnnnnnnnnnnnnnnnnnnnnnnnnnnnnnnnnnnnnnnnnnnnnnnnnnnnnnnnnnnnnnnnnnnnnnnnnnnnnnnnnnnnnnnnnnnnnnnnnnnnnnnnnnnnnnnnnnnnnnnnnnnnnnnnnnnnnnnnnnnnnnnnnnnnnnnnnnnnnnnnnnnnnnnnnnnnnnnnnnnnnnnnnnnnnnnnnnnnnnnnnnnnnnnnnnnnnnnnnnnnnnnnnnnnnnnnnnnnnnnnnnnnnnnnnnnnnnnnnnnnnnnnnnnnnnnnnnnnnnnnnnnnnnnnnnnnnnnnnnnnnnnnnnnnnnnnnnnnnnnnnnnnnnnnnnnnnnnnnnnnnnnnnnnnnnnnnnnnnnnnnnnnnnnnnnnnnnnnnnnnnnnnnnnnnnnnnnnnnnnnnnnnnnnnnnnnnnnnnnnnnnnnnnnnnnnnnnnnnnnnnnnnnnnnnnnnnnnnnnnnnnnnnnnnnnnnnnnnnnnnnnnnnnnnnnnnnnnnnnnnnnnnnnnnnnnnnnnnnnnnnnnnnnnnnnnnnnnnnnnnnnnnnnnnnnnnnnnnnnnnnnnnnnnnnnnnnnnnnnnnnnnnnnnnnnnnnnnnnnnnnnnnnnnnnnnnnnnnnnnnnnnnnnnnnnnnnnnnnnnnnnnnnnnnnnnnnnnnnnnnnnnnnnnnnnnnnnnnnnnnnnnnnnnnnnnnnnnnnnnnnnnnnnnnnnnnnnnnnnnnnnnnnnnnnnnnnnnnnnnnnnnnnnnnnnnnnnnnnnnnnnnnnnnnnnnnnnnnnnnnnnnnnnnnnnnnnnnnnnnnnnnnnnnnnnnnnnnnnnnnnnnnnnnnnnnnnnnnnnnnnnnnnnnnnnnnnnnnnnnnnnnnnnnnnnnnnnnnnnnnnnnnnnnnnnnnnnnnnnnnnnnnnnnnnnnnnnnnnnnnnnnnnnnnnnnnnnnnnnnnnnnnnnnnnnnnnnnnnnnnnnnnnnnnnnnnnnnnnnnnnnnnnnnnnnnnnnnnnnnnnnnnnnnnnnnnnnnnnnnnnnnnnnnnnnnnnnnnnnnnnnnnnnnnnnnnnnnnnnnnnnnnnnnnnnnnnnnnnnnnnnnnnnnnnnnnnnnnnnnnnnnnnnnnnnnnnnnnnnnnnnnnnnnnnnnnnnnnnnnnnnnnnnnnnnnnnnnnnnnnnnnnnnnnnnnnnnnnnnnnnnnnnnnnnnnnnnnnnnnnnnnnnnnnnnnnnnnnnnnnnnnnnnnnnnnnnnnnnnnnnnnnnnnnnnnnnnnnnnnnnnnnnnnnnnnnnnnnnnnnnnnnnnnnnnnnnnnnnnnnnnnnnnnnnnnnnnnnnnnnnnnnnnnnnnnnnnnnnnnnnnnnnnnnnnnnnnnnnnnnnnnnnnnnnnnnnnnnnnnnnnnnnnnnnnnnnnnnnnnnnnnnnnnnnnnnnnnnnnnnnnnnnnnnnnnnnnnnnnnnnnnnnnnnnnnnnnnnnnnnnnnnnnnnnnnnnnnnnnnnnnnnnnnnnnnnnnnnnnnnnnnnnnnnnnnnnnnnnnnnnnnnnnnnnnnnnnnnnnnnnnnnnnnnnnnnnnnnnnnnnnnnnnnnnnnnnnnnnnnnnnnnnnnnnnnnnnnnnnnnnnnnnnnnnnnnnnnnnnnnnnnnnnnnnnnnnnnnnnnnnnnnnnnnnnnnnnnnnnnnnnnnnnnnnnnnnnnnnnnnnnnnnnnnnnnnnnnnnnnnnnnnnnnnnnnnnnnnnnnnnnnnnnnnnnnnnnnnnnnnnnnnnnnnnnnnnnnnnnnnnnnnnnnnnnnnnnnnnnnnnnnnnnnnnnnnnnnnnnnnnnnnnnnnnnnnnnnnnnnnnnnnnnnnnnnnnnnnnnnnnnnnnnnnnnnnnnnnnnnnnnnnnnnnnnnnnnnnnnnnnnnnnnnnnnnnnnnnnnnnnnnnnnnnnnnnnnnnnnnnnnnnnnnnnnnnnnnnnnnnnnnnnnnnnnnnnnnnnnnnnnnnnnnnnnnnnnnnnnnnnnnnnnnnnnnnnnnnnnnnnnnnnnnnnnnnnnnnnnnnnnnnnnnnnnnnnnnnnnnnnnnnnnnnnnnnnnnnnnnnnnnnnnnnnnnnnnnnnnnnnnnnnnnnnnnnnnnnnnnnnnnnnnnnnnnnnnnnnnnnnnnnnnnnnnnnnnnnnnnnnnnnnnnnnnnnnnnnnnnnnnnnnnnnnnnnnnnnnnnnnnnnnnnnnnnnnnnnnnnnnnnnnnnnnnnnnnnnnnnnnnnnnnnnnnnnnnnnnnnnnnnnnnnnnnnnnnnnnnnnnnnnnnnnnnnnnnnnnnnnnnnnnnnnnnnnnnnnnnnnnnnnnnnnnnnnnnnnnnnnnnnnnnnnnnnnnnnnnnnnnnnnnnnnnnnnnnnnnnnnnnnnnnnnnnnnnnnnnnnnnnnnnnnnnnnnnnnnnnnnnnnnnnnnnnnnnnnnnnnnnnnnnnnnnnnnnnnnnnnnnnnnnnnnnnnnnnnnnnnnnnnnnnnnnnnnnnnnnnnnnnnnnnnnnnnnnnnnnnnnnnnnnnnnnnnnnnnnnnnnnnnnnnnnnnnnnnnnnnnnnnnnnnnnnnnnnnnnnnnnnnnnnnnnnnnnnnnnnnnnnnnnnnnnnnnnnnnnnnnnnnnnnnnnnnnnnnnnnnnnnnnnnnnnnnnnnnnnnnnnnnnnnnnnnnnnnnnnnnnnnnnnnnnnnnnnnnnnnnnnnnnnnnnnnnnnnnnnnnnnnnnnnnnnnnnnnnnnnnnnnnnnnnnnnnnnnnnnnnnnnnnnnnnnnnnnnnnnnnnnnnnnnnnnnnnnnnnnnnnnnnnnnnnnnnnnnnnnnnnnnnnnnnnnnnnnnnnnnnnnnnnnnnnnnnnnnnnnnnnnnnnnnnnnnnnnnnnnnnnnnnnnnnnnnnnnnnnnnnnnnnnnnnnnnnnnnnnnnnnnnnnnnnnnnnnnnnnnnnnnnnnnnnnnnnnnnnnnnnnnnnnnnnnnnnnnnnnnnnnnnnnnnnnnnnnnnnnnnnnnnnnnnnnnnnnnnnnnnnnnnnnnnnnnnnnnnnnnnnnnnnnnnnnnnnnnnnnnnnnnnnnnnnnnnnnnnnnnnnnnnnnnnnnnnnnnnnnnnnnnnnnnnnnnnnnnnnnnnnnnnnnnnnnnnnnnnnnnnnnnnnnnnnnnnnnnnnnnnnnnnnnnnnnnnnnnnnnnnnnnnnnnnnnnnnnnnnnnnnnnnnnnnnnnnnnnnnnnnnnnnnnnnnnnnnnnnnnnnnnnnnnnnnnnnnnnnnnnnnnnnnnnnnnnnnnnnnnnnnnnnnnnnnnnnnnnnnnnnnnnnnnnnnnnnnnnnnnnnnnnnnnnnnnnnnnnnnnnnnnnnnnnnnnnnnnnnnnnnnnnnnnnnnnnnnnnnnnnnnnnnnnnnnnnnnnnnnnnnnnnnnnnnnnnnnnnnnnnnnnnnnnnnnnnnnnnnnnnnnnnnnnnnnnnnnnnnnnnnnnnnnnnnnnnnnnnnnnnnnnnnnnnnnnnnnnnnnnnnnnnnnnnnnnnnnnnnnnnnnnnnnnnnnnnnnnnnnnnnnnnnnnnnnnnnnnnnnnnnnnnnnnnnnnnnnnnnnnnnnnnnnnnnnnnnnnnnnnnnnnnnnnnnnnnnnnnnnnnnnnnnnnnnnnnnnnnnnnnnnnnnnnnnnnnnnnnnnnnnnnnnnnnnnnnnnnnnnnnnnnnnnnnnnnnnnnnnnnnnnnnnnnnnnnnnnnnnnnnnnnnnnnnnnnnnnnnnnnnnnnnnnnnnnnnnnnnnnnnnnnnnnnnnnnnnnnnnnnnnnnnnnnnnnnnnnnnnnnnnnnnnnnnnnnnnnnnnnnnnnnnnnnnnnnnnnnnnnnnnnnnnnnnnnnnnnnnnnnnnnnnnnnnnnnnnnnnnnnnnnnnnnnnnnnnnnnnnnnnnnnnnnnnnnnnnnnnnnnnnnnnnnnnnnnnnnnnnnnnnnnnnnnnnnnnnnnnnnnnnnnnnnnnnnnnnnnnnnnnnnnnnnnnnnnnnnnnnnnnnnnnnnnnnnnnnnnnnnnnnnnnnnnnnnnnnnnnnnnnnnnnnnnnnnnnnnnnnnnnnnnnnnnnnnnnnnnnnnnnnnnnnnnnnnnnnnnnnnnnnnnnnnnnnnnnnnnnnnnnnnnnnnnnnnnnnnnnnnnnnnnnnnnnnnnnnnnnnnnnnnnnnnnnnnnnnnnnnnnnnnnnnnnnnnnnnnnnnnnnnnnnnnnnnnnnnnnnnnnnnnnnnnnnnnnnnnnnnnnnnnnnnnnnnnnnnnnnnnnnnnnnnnnnnnnnnnnnnnnnnnnnnnnnnnnnnnnnnnnnnnnnnnnnnnnnnnnnnnnnnnnnnnnnnnnnnnnnnnnnnnnnnnnnnnnnnnnnnnnnnnnnnnnnnnnnnnnnnnnnnnnnnnnnnnnnnnnnnnnnnnnnnnnnnnnnnnnnnnnnnnnnnnnnnnnnnnnnnnnnnnnnnnnnnnnnnnnnnnnnnnnnnnnnnnnnnnnnnnnnnnnnnnnnnnnnnnnnnnnnnnnnnnnnnnnnnnnnnnnnnnnnnnnnnnnnnnnnnnnnnnnnnnnnnnnnnnnnnnnnnnnnnnnnnnnnnnnnnnnnnnnnnnnnnnnnnnnnnnnnnnnnnnnnnnnnnnnnnnnnnnnnnnnnnnnnnnnnnnnnnnnnnnnnnnnnnnnnnnnnnnnnnnnnnnnnnnnnnnnnnnnnnnnnnnnnnnnnnnnnnnnnnnnnnnnnnnnnnnnnnnnnnnnnnnnnnnnnnnnnnnnnnnnnnnnnnnnnnnnnnnnnnnnnnnnnnnnnnnnnnnnnnnnnnnnnnnntttcttaggagaagcagctattagttctctaatatactactacgtatactactgtctctatttcctgatcctccattatatacagcattcccttaggcattctatacctaggggtcttacagtgatcctatacgggctctggcctattacagtactaagtcctttatatacttagattttgtcacggataactttgtgcgctactatatatattggtcctgggcatgtcagagcgagagctctgacataatggtcttttggctgagcggaagaatgtgcgcccaggcatatcctttacagatttaaacccttatatatactcttaattatatataataactaatagactattaatctattaataaaggaaggagtattaatatatataaagctttactatatagatattaatagatattagttaaaataagaagttaatattagataggttaatatagattagattctaactaatagaaatacctactaatagtctaataaaagctttaccctattagaaataagaatagtttagggaattacttagaatatctaagattaattatctaattagttataannnnnnnnnnnnnnnnnnnnnnnnnnnnnnnnnnnnnnnnnnnnnnnnnnnnnnnnnnnnnnnnnnnnnnnnnnnnnnnnnnnnnnnnnnnnnnnnnnnnnnnnnnnnnnnnnnnnnnnnnnnnnnnnnnnnnnnnnnnnnnnnnnnnnnnnnnnnnnnnnnnnnnnnnnnnnnnnnnnnnnnnnnnnnnnnnnnnnnnnnnnnnnnnnnnnnnnnnnnnnnnnnnnnnnnnnnnnnnnnnnnnnnnnnnnnnnnnnnnnnnnnnnnnnnnnnnnnnnnnnnnnnnnnnnnnnnnnnnnnnnnnnnnnnnnnnnnnnnnnnnnnnnnnnnnnnnnnnnnnnnnnnnnnnnnnnnnnnnnnnnnnnnnnnnnnnnnnnnnnnnnnnnnnnnnnnnnnnnnnnnnnnnnnnnnnnnnnnnnnnnnnnnnnnnnnnnnaaatagatatataataatatagatattccttcctaagcctatataggcttatatatattttcctcttatatagaccattatctgttatatactagtaatatattatttagtaataataaagactagaaaagtttagaaggatatatttataaactttatagtaatctaattaattaaaaagtatttaaataaaagatagttactactttaactactaaaactaagcttctagtacttactaaagctagaaaaatagtctaatagtaatactaagtcctttatatacttagatttaaacccttatatatactcttaattatatataataactaatagactattaatttattaataaaggaaagagtattaatatatataaagctttactatatagatattaatagatactagttaaaataagaagttaatattagataggttaatatagattagattctaattatagaaatacctactaatagtctaataaaagctttaccttactaaaaataagaatagtttaaggaattacttagaatatctaagattagttatctaattagttataaaagtagatattaaagaaaattttattaattaaagatagctcttaaagctctaaattataattactttaaaagctagggggtatattagaatctaggataaatactattattttttatccttaatatagttaggttatataactaactaggctagttttctatagaaaaactaacttagatggttttctgcctaaaaaaccagtcctacagtttttcgcccaaaaaacatcctttcattttattttatttatttgattactaagatatctattagattatcatattttagtacaactaccatttgtgccggcgccgccggattcggccgccccctcgatcgggtttggcgtccgtcccgtttgggtttggtctatcccaattcggcttggcgtctacgcttttcccaaattggcagaagcacagcccgctcctgttctggttaagtagctccagaagtagtttggcgcccgggctatccctaaactggtatctgccattcccgaccgcctaccagccttatccttgaactatataacttccagtgcgtcgcttgatcatcctcctctctctgactgactacaccatttcctcccccgtcattcctagccgtgaaatgataccgtaattccggatcgtacggtattcttccccctgtgcctccctgtttcagctgggttcctcgttatcgcctgtgcccctttctccactcgactcgctatagatagatctatctattggccctagtcgccctaatccttaaattagaccgctgcactgcaaccctataatttgaatttagacgacatcttatatacttaccctttagtccctgtttcttcgttgtatccgctataacggtatagccttttataatcggcctagggagagagccttaacttgcgaagagattcgatttatgacctagccggttgagcacaattgtgacgcggcgctctctgagctagtgctaatcacaatatctcgctatacctatgtatctattggcacttactactcttacgccccacctataacgaagaatatctcagtcctagattcttttttgtaaaggcttcgacttttggtagccgtgaataggctaacgtcactgagtggataacctagacgccagtatctacgccgagtaatcttctgtagacgaccttagcacaatttacttttctagcgaggcgtagtaaagaagactgaggaatctagactatcggaggttcctaggatggtcggtatcactgtacgcatgataatatcttacccgactggacgctgatacctatactaaacaccctttcggagacgattccttcactataatcctcttctagtaaggtgtaatagggtagactgtaaacttatctaagtataaaacactttaatctaataggagaaatgctatatacagtgtcggccttacgtatgactccttgtgaattccgttatagataggttggtggatcctcgtattagcaggctgcgctttatcttacgactcttctccattcgacctgcctaaagcgctcggaagaggtaagggaaagtaggtaggtataaagggttgttagaaatccttactaggaccgagaaggaggttgactatctatttataattctttctcttctattctgatatattgcgtctatatctttcttatagtatagtaccgatcaatctagacaatatgatctattatcgtctgcctactaaaaaaccatattttaacctattctaggcactcggttcctacgattgtatccatttacagatacctttagatagacctacgccggcctatctatttctatctagctagtacaggtattcgagtcttctattcttagggtatacgctataccttcaaagtcatttctatatacctagtgaagtcgagataatattagcccctaataagtttacagaagaagtaactattaatagctcgaatgagtttaatatggatttcttaagtacctccttaggaagagatacaaacgttgctatatcaaatatatatatagcaagtcgagaattgctaaatgatatttctagtagtgatttagggtaaggttctaattagtattataatggtacgtggtggctattattttgactccccttagtttcttcaattcactctattaaacttattataccctatctctctttccttactaataaagtagtcgataattgagggcttacttaatactttaagaccagacttctaaggtaataagcattataagagcaatatgatatcttcttcctaagatattatctaggggggaggtcttaagcaatctatacctttatactctatatcggtcggtaatagcctctgtatcctagtagcagaggaagaatttctaagttaaacgaaaatatataaaaatacaggtcagtggtctctcagttagctaggttacccagtcctctagcttacgtagtagaatatagacgaagctataatagagggagacattttactacattcgaacctgataatagatatagtagacagtaataaaatagttaatagctaagttcttgaccctacgggctaggaaaagtaatctactctaacagatttattacctagagatactagaattaaagtagacgaattaggatcgaaaccggcagcttatgtcattgggaaaagcatgccagccaagaagtataacagatatcctatttccgaaagctatatggttattagccaagagaaagacagggctgcagtttataataacaaaggcgagctacagcgttgtgatacagagagcctgttagtatctccaaaatttcgttaaaatggaacattagcgcgttcaatcttacctatattctaagacagtaaaaagcagtcgctatatagcctaacagaggaagttataggattttatccagtattagattaggctccagttttagaccagctttcggttattatccctaactgccgttcctaagagcgaggaacgaataactctatcttaataatacgaatagcctctttaaacaggaagcgggactaggataagtatatatctgataacagtagcgatgaccctcatggccccgacgatacagactatgtaggcgaaagtggtaaagacgtatatagaaatagcattcctttctatcgactaaaaagagtaaggcgacctaccgtacagcttaagcctagacctccccggcagaacactaaacgtctcttagtcgacgaggcagttcaatttaaagtagccgtagatcagtcttccccaataagcttatataatatcgaaacgattcctatccgaggtttccttacgcgatagatacttttattaagggtcatctattcagttacctttaaagagtaggtagagtattcctactcttagagatcaggtagagctacttcacactataaaaacaaaattggcagccagcattctaagcaaccccctcagaaagggtcctgcgctaggaaaacgaccgggccaacccgattcctatctaaggacgaccaacttttgattgaattgaaggaagagcagagcctgccatagaagcgaatcgcacagtattttcctagaaggtcggtaggctccctctaggtacactattccacacgacttaagggccataaggctagaaattctaggtattctgggcagagttctaacgtaaggagcgaatctttatatagaggcgcaccttgcgaggtagtttaagccgcgggtagcaagagtaaaggcaccgaagaaggtatgttaagaccgcgatacggtctacctcggcgcaggcaaacggtagaccgctattccccggtttgagttggcagtagttattagactttatcgaatatcagtcaaacggatcgccaaaaataagaccgtcccgctgggtctagcgcccgtagtgcattgggcaacagttgaatcttaccaggtttcacagtttcgaagagcggcaatggtctctccgcagagtcgctaagccgctctggcaatgaaacgcagttttaatctcactttttgctattggcgacactgctttcgactgtaatgtgagtcttacaaacggcggacctgtgaattactagatccggttagttttgccttttagggtttagagccccaatacgctgtcacgtaacctaccttcaacgccgctgacttaaaagaaaaggtggcgccgtttcccgacatcccacatatagacgggttgttccagctgctgcccaactttgcagaccgccgtcggactcagcgtcggatgtgttagtgctctgtcactccagagagagattttgtaattcaccgccatccaggaattgacggccttcccttggttacttttggccttgggctgtagttacctacgaatgacaggcttgagcaatatttctccaaaattgaccaatagatattagcgtctttaagttcaagccggaacaaggcaccccgtgaggtgtgataataacggcaccttagcgaatcaattaggtatgaagcggtgttgaagcgaagggagtgaaacccgcgagggtcctccactatgagttcttgcagaaagggagtggaccagatgtgtagactagacttgtgacattcaaactagatttctggcgtgaatacaaaggtattgccccatgtagcaaattggggttggtgagcagatttgtctagagagcccatcatgcaatcactcagcccaagaacctccaaggtttcttttacggactaaattcaacgctcggagtctgagtatggacctcggcgcaagtttatttcccatcggggcattgcaagaaaccgcccggcactgcaccctcatgggtcatcaagccacagtagtaggccaatgggtgaccatcaacaccttgcgccttgccattgtagtaaaatacgacgcgctcgtccccgtatttcttattgttcttgccaccgttgtaaggcccgttcttgacgagcggatactcctttcgattctggtcgtgctcggggcagtgagcagggaagtgcagctgcacattcttgctgttatcattatcgaacgggtgcgggtagttcttcgcgcctcgcgtctcaggagggtccagcatgcccaggttcacggcgtgctgcgtggcaaggtagatatcgtgtccgtcataagtgttcttgccgcacttgatggatgcagaggcgttgggaccatcccactaaaagagatatcagtcagaattggaaggtttcaatttaatggagtgatgacgtacgttaatgggtgcgttggaaggttccccacgctcttgaagatcagcaaagtcatcggccgaaagggccgaggcgaggctcaagaagaggatggaggcggttgccaatgtgaacttcattgttgcggttggacgattggagtagaaaaagattgctggaggattgaagttgaactgttgatgctaagatgaggtctgagtgcttgctgctggattttagagccggcaaaggctcttttatgccattgatggagtcacctaggcttcacctaggctgattgagagccttgcactagcagggacggacatacagaatctacctgttgaagcgtcgattggctcacagaggagctgatatcgcgcgacaattgggggcaattctacattgtgatgcaatgatttccttgtttggaggctttttagtaggactgttagtagtggaatccttcaaaccggtaaagttcgctttgcatacatgcgactagggcgagtgctccaaagcaagcttgaagcggaagacaatgactttgcctactctcactgtgacaagaaagtctccatttccctcgcaactgcgtatagaatagagcaattggagtgttgaagttccaatgctgatggagcttatcggtgtaagctactctaaagccctgtaaatcgtactgcatatagcatttgaccactctcgtctttcggaccctgcgcatggacatcgttcatttgtacacaaggctgggaggattctattgggggccgtcagccttgagaccaaaactggccccatcttccctagtggatataatgtccagtgacgtcaatccgcatgtccatccgcctgttgaactggtcgggtctcggcgtgacagatgctccgacagaatcatatcgtctttgcataccaggcttctcatcttttaggtaatatcgtctcgactcaagacgctattgatgcggttgactggatcaagctgcttggcggcgccaaagtctcttccctgaattgagcacgattttatgttgcgccttttcggccaagaaaaacagttgttccactcgacgaaatcagttgttgttgtatcgggcattttgctctaatcggtgcggcttaattgtcaaccccacgttcctggttgatcggcagattagtcatgatgggcagccttatgatgtcactgtacagggctattgttgcaacaggacggaggattacactgcgcctcgatcaatatcagggtagttgtgtgactctttggacttttgctgcctagttgccactcttgaaagtttccgatattgcgaccactccgcactttctttcctcgaacataacgcaactaacacatccttcgtctcagcagcgcagcgtagtgactgctcatctctcaaacactcaaagtcccaaaatttattccttcaagagccctcgcgctctgtcatcatgaacaccagcattcaagaaatgacgtgcaaatcgattgagctcgacggctttggctctgccgccgatgacgcttggttcgatcaacatactgcacccatggacggcgaggaagagaccggggtgcatccgtatcaagctgcggctctcaaagcgtacctcaaaggcgactccaagccatccgagacagctgccgccctgaccaagccacatgactccgagaagaagaccgacctgcgagaccgcatagtgggcatactcgaagacgcactttttgagctgcctgaaagccacacacccgctcttgtcgacctgctcaaagaacttagccaactgccagacgaagaggacggcgaacctgtctggaaaggtctcaaaagtttcggccactcatgggcagatggatggaagcagagccactggcgcaaagcgttggcaacgcgggatccagccacaagagcgaagaggcgtgaggctcacgtgcaccaggcctttgtggaggcgtcttgtgcaatggctgctccgggaccgaatgctgaagatggtcttttgccactaagctggggctatgagtgcatctccgaagcgctcgaatgccaagatgcattgtgggactttgaggtacctgctgcggcagtgtggatcaaggtagctggagaaagactcagagagagcgcgaagaaaggtgagaagtcctgggcgttggagagagaggggaggctttggacggcggggccgatgagcatggatcggtggaaattctggttgcaaagactcgaggagattgagaagattggcaaggtcatctcgtcaacggcgagtgaaggtctgcgggatgctcgagcccagtctaaggagtagttgatgactatgcctaaacacttagcgttagagtagcagtctggattgttaatttgcttccagacggccttgatggcaaattgaacatgtgctaggcttgtgccctgagagtcgttgataaagtcggattccagctaacaggctagaagaccgattataagatcacacattgcccaccccatgactcccaagccattagccccttataaatcgaagatccgatcgaagttctctgcctaaacaatgttgaatgtcagaatagttcggcaagggtcatgcgatcgactgacatacgatatccaatctccggggccagatttgctatcggcgcggtacagatccggatcctgatgatagcagatcagaaggcgtataaggggactcgtaggggtttggaatcatccccgacgcacaacatcgatagtttggtcggccatgtccaaaggcacgctcgcagctgacagcggggaagcgtcaaggaggcttgaatggtgggaacataacgagatataaagacaggtacagacttccttggttggtgggtgatgccaaaatcacgggatggattcccgtcatccgcgtttgattctaggtttgggggaggggaacagagtttatctgtcctctctatcgcccacgaaagacgcttgatcaaatttggcagcttgctgggtggcatggacgacattttgtagtcgatttctgttataattttagcattattctcctgtgcatgacatggcgttgtttataacttacctttgcttcttcgttccatcatctgttgatcatcacactctgtggcatgacttttttcttccgttggtaaactttgttctgtacgtatccgtttgcgtcgcgccatattctcttgttcttccacgctgattgattgatctataattttgacaagttcttggaactgttcgcaaggttttaagggttcggccgacacttcagagtagagcggtgaaagtcgatgatcaaagcacgcccaagctcttcactccaatggacattgtctcgcctaaggtcttcatgtattatcctgagggctttgatttccttgttcaaatttgtgaatttaacgctgtaccccctccccccagatatcacgagtgatctgaaggtgtagacgtaacgttaactaacgcagtggtctatgggtctcggggccgtcataagcagacagcagtggagctagacaggagcttttttctactcttccccaccccaacgcgatgaccatgccgcatattgccagaggtgggttcaagagcccgagggcgctttaaccatttcacttcctctaggtcaatgacaaacaaacgaacacccaggtcatcccacagtatgttgcgccacttactgtcgccatggacaactccatgtgaccggagcacagtcagagctttatcgcgctctaggtgaaagaatctggaattctcatcgttgataacatgctgaagacgttttccagcccagctcagtatcatcatctacgccattaattcgccatggtaccaatatgagactcgtggcgtgaaagtcccaagacagacggggatctgatttccttgcaggctcctgaggtgacgataattgtttgcctctgctttaatgagatgctgcttgtccgccgtggtagccttgattatcacagtgtatccgtgcgatagaagagtcgctttgataaggtaacccgtccgaccacagacgtgaagttgctcaaacccgtgatttcggtttcgggaaagttgatggtgaagccggcgtgtgaactcctgcggtcccacggagtgtctttggccaccgtggagtttccagttggggcattctttatccagaggatctcggttggccataccgcggatgcaggcaatagtgcaatatggtcgcgcggattgccctactttttgagaagtctgtttattgttccggccggcttgtatcctttcgctttccttagttaattaacaattgttacctcgaccgcggctcaacctactgcgcgccgctgctgcaatggatggcgaatgcgattcttcatcactgccgctaccttcggtcgacaaatgcttcggagtagacatgcctggttggcagcgagaacgggatcgtgtattgtgtgtcttcggctctggtttccagtgcgagggtcaataattggaggctcgcgggtctttacgaagcgtttcgggaatttttctcaaaacgtcctggtattcgacctcccaggtctttagtctatcgtgtgccgcatcatgccattcttgagatagatcttcggcggccagcgcttgaagggtaaatgcaagcacctgaccgatggcggtccggtagaggcgccaatcatcgtccgcctgcacgtcctgattcgggatacacaagaaatattgaacaactgtggggtcatcattcggaatatagagaaaaacaaaagcctcccccgtgcagatgtagccgtattgaaccccactgtcgatcatatataagaatatctgagtaaccactgcggcaacgaggtaggtggcataaaactcaaacgtatcgccttcctggtcaatgacatcgcgagccagatccatttggtgtagacccgccaccaattcagggattgtcaccttatacggcgctttgaactccactgcatacaccggtttttatcgttcatcagccacaaggtacacgcagaactggtcggcgcgccgattgcgtcttcgtgtagtgccatccctcttctatccctgcgccactcctctccccattcctctgcctcttccatgcctagtgttcgccactcgttggggtgtccgcgtgccctgaaggttcatttgctccaggctcttctccaaagaggtttccgatgggtttgcgcggtcgtagaaggtaactcggccttggattccaaactcatatcgaaggggttcatcatctcgcaaagccataatggcctgtggcataaaactcaaacgtatcgccttcctggtcaatgacatcgcgagccagatccatttggtgtagacccgccaccaattcagggattgtcaccttatacggcgctttgaactccactgcatacaccggtttttatcgttcatcagccacaaggtacacgcagaactggtcggcgcgccgattgcgtcttcgtgtagtgccatccctcttctatccctgcgccactcctctccccattcctctgcctcttccatgcctagtgttcgccactcgttggggtgtccgcgtgccctgaaggttcatttgctccaggctcttctccaaagaggtttccgatgggtttgcgcggtcgtagaaggtaactcggccttggattccaaactcatatcgaaggggttcatcatctcgcaaagccttaatggccttttcgacaaagttatccaccgtgtctcgctcaaaattccgaagagacgcttccgaatagatcggcctgttctggacattcgtaaggacataatcaatttgggtatcagaagggaatagtgggcgcgaggtaaaggcaccggtgcggtcgaatttcctccagattttctcttggagttgggggaaatcaagccaagggacaacgcgcttggggtaaagtcggttgacggggtcagtcgcgtcgccctgggtcgtgagagtcgcatccgtctcaacccgaatcgcttgagacagagagttgtggcagcgatcgaggaggcggaatagtgtgttgggttcgagtcgccgttcagcctctccctggaggcgctctgcttcttctcgcgcctgtctctcttcctcttcacggcgctgtgcctcttctcgtgcctgtctctcctcctcaagctgacgtcgtagttcagcgattgtttcttccatcgcttgttgaaatcagtattcagcagataatcgaatgatgcaaatcgaagtctacatagtagggggttcgctgtctggcgcgggggagtggcccgtcagggcggaatgcgtccagatgttttaccagcttactcacccccttggctcgagtcgattcatgcctcaggcacaaaataccttagccttttgatatgctgacgttcaaagtcctttgttttctagaatatacgtcgattcggtggtctcggattacctagactggcctcgccagtaaatttataaatatagttctacttaaattcctcagcaagtacagtcaccgtggcgaggtcattatcttgactacatcactcgcgagaccccgttttccgttctttcctgttgcgaaggatatattgtgtgatctcgctgtgggtaaggcattcgacaaagctaataagcagcgaaaactcttctgatataaatggaataggtttacctctctcaatctccgtctgttctgcggaacacccttctgtatgctcttagttttgggattagacgtcacgcagtcaatcgccatatggacctcatcgaaagcaaagagacgtacctttcctgtctgggcacttgaatctctcgtcaggaataggctgtatgggcgagacaaactgagctgcctttactgacaaaacctgtaacggtcagttgctaaataatgctgggagagctgacgtctgacgaggtatttatatagattttgattgagtttccaggtttgggtgggcgttgatggcaaatctgatgggcacgatcaagcttcccagcagaaaaaggaatgtaaagtcgatggcatgattcttcggatcaaaaaatgactttgttcaccatcaattgaaccttgttggaacaccctcaggttaaagcagccgcactatatgtctcattttcaatacccttgcgtaagtgccgcagagttctgctctcacgataagctgatataaacagataagaaagtaaaatcaaaactggccgctactgggttgtccaagcttgaaaatttgtcgttttcattcttacccccccaaaaaacatcattctttcaagcatgattcgattgcgcatcttgcaagtcagaaaacaaatgtcgcatattgcaatattgtttaggcaaccgtttcaatttttttttaggtaatttatgttgagaagacggtctctatctatgcttgcaaatgacaagacactgcttctaagagtagtaaataccgtgcgtataatgcataacagatgtttgaaaagtaccccacaagtatacaggagtgtgtatgtgtgtatgtgtgtgtaattcatttaccctgacccctcgcaataaagcgatatgtaggctaccactactttttgtaaatatatgataatttatccactgagattgttctaaacttcctgaacgataaactttaagccttacctagtaaggcctatgattgtctccactttaaactatgaaaaggctagggtactccactaccccgggttatatatctctctatagagacgcgattgtagtaattgatatactagtgctaggaattgaacctaaaccctatagaataataagtgactaatttgttatcctataggttacctttagggtacttactactatactaccgctaccggcaccgctactaggaatatatatatatatatatatttcatttaccctaaccccttataataaaagtgatatatagactaccttaactatatatatccctatatatatatatagagtgatctacttcctagaaaggaacttagagccttattaaggcctcttatagcctagttaccgttcctattattaggctacccttatagtatacaactatgaaactgttataacgccttaataaagtctagtatagcctaggcctttttagcttataagatagtatctagtttaccttttttaccttattttaagcctcctagtagacttaatatactattaaacgcgttccctacttctctccttagatttctttataactctactagacttaggtagtctataagtatataggtaactatttcttatatactacaattatagcggttatccttactatagctaatcttcttatagtaggtagatagctaattgtagactatatacagctgcgttagtagatatacctagtccctaggtaggcttctatacagcttcctagtatatattaccagtagagtattattaatcttctgtagataactacctttattagatattctctatttatattcctactaggaggtaatatttctatagataaataccctcttccttataagtagtaggtagaaagggtaagatttacctaggctagctgtaagcttcgctatttagtctatagcgttattactgggattattataatatcctagtacctactaaaggtatagtacggttcctacagtctagaccttagtagcagcttagtagatcgtatggacgatcctttatcctaacttattccttatactcttaattacttataaggctaacttactatcgcagaggattattacagtcgcttatcggtcttctagtcttggttaccagtaggccatcttaaacatagtactgattatatagaagatacctattagctccgctatatataccgaccagcggtctatcggtctaacctagacctattaggatttgaccatctccatatcgtcattgaatgttaccaccgcagctcctgattgactatcgcgtcctgaggcgtccgaatagacgatgatatctgatattgagcggattgcctcggcctgttctatcgctgtctctcggtctgaaccgacttcgatctccacgaagggatcgagccatggcgaggctgtcttctcttgcggggaactatcgaaggctgaaactcctctaacgaaaaggggttggtcgtttcttgagtgtttgtgggtgtggcttcgagagcccccgcgggtgggtccgccatcggtttggggctagctcccgctcggtacacaatcacaacaattttatatagaagatgatatcaacaacgccttatctcgaagagtcaaacggtcttttgtcagcaatggtcgaaccggaccgctggcttctccgctaccaggatggatcgaaatcagtttcaccactttactctcgtgaatctttctcgtaccctatcccaaaacatgccaatcttgttcaggcctagcctatttccaaatgccgaatcgtattgaaaccgtctctcacgtgataagaggctctataaattacctgtaatatttttgcaaaccctactgactttattctttcgcatcaccttgcctggcagaaggcaatatcagaacaatcagaatttctgattcctgatcattctttttcggaccatatccagatgcagaatctggtccgaaactccctcggcgtaaagaggcatctcgtattgacgttgtgtcgaccggatctaccaaatatgtagctttttggcctggtttgccatcaaacgggttatcacgtgccatgtggtgattggcttaaaaggtgggactatgagtcacaaaagctcaaacacagtcaagagccccgccacctttctccgcacagacttcattcagtaaacaaacaatcacttgttcctgttgctcccaacactcatgtggaaaatcctaacaatcctggatcatgcttctgaaccgattttattgcacgcgctgcgcaatcagctttaaaactttcttcgcgaggctgcaacatatctacgactctccatatcatcatatctgctacatttgtttcccaccacaagatttcgcgaagatggttgagcttgatgagcacctcggaactgaacacaactactgtatttcctgcgacatccaatttgaaacagcccaaaatctagctcagcacgacataggagagcacaacatgtgtgtcacctgtcgacaattcttcggttctcgatcaagtttatccaatgttagtttgtatctaatttcccactacgcagcaggtaagattcttaaacattttatagcacatgaccacccacatttgaaagccatcttttagtatggaggatacatcaaacgtccaatgactattacacctcaggtggcaatatgtgcggagttgagtgtgcttgtatgttggttggccacgaatgcgagcgatgacgtaatggagactaaaaaaatgaacggtgaacctggtttcttcatccatcaatgtgggccgagaacagtagcttttacaattcttgctgaaccctcgtgataaacggtggctggatatgatacagcggggggcgaaactttatgatgttgaacgttattgtagttaaggaatcaagtaacaagtagctggacaggatcagtgcaagatggctcaagtcgtgatatggcgccgcgagtagaatacttccaatcatctcgatttgaatgatagcttattgtatccaaaacacattcatgcatttcggcaagtactgcgtaacactgaatgtatcagaggtgcaaggagccgagctcagaaaatatgccgggacaattgacactcccaaaatgataaagagctttgccaaaacgttttgcatgagtcaaagcgtgggtcgagagcaataattcctcataaggacactgttcacctcagactggatttcacttgttgatgaccccgcccgcacagtattgatgatgttacggacgtcatcatcactagagtcctggattgccctcaaaaagtcgttcaaaaacctttggtagtgacggagttctgcttctattttacttgcgtgactcttgcgtcgcttgtcggagctcatatcgaacacgcaaatagagccacgcttcgtgcattccaagcatggattctcagaactgcactgtcgttgaaaaccaacaagtaagcatctaagtatacaatataatccaggatcctttaccttggtccgccggcgctgacattctttgcaggctgctgagagtcttcgtattaggtggtctcgtaccgggggtttcccccgttgatcagatatcaagggtttggtagctggcgtataaggctggataggcttgaatcgtgaacaagacatctgtatcgtgcgcttggtatcaatgtagacgcggcgggggttaaaggtctgcgtaagagaggtggccaagcgtacatcacaagcagtaagaatggtggaggcccggggaaaaagaggagccaggcagacccattgctgactcagcattctagactcgcccgaataccttacggtctgatacaacagctattttaggctgttatttacagctgtacagaaataacgccaaggaaggggttcaaggacagcgtaactgcaataggtatagcgtgtttcaccagagagtttgagaaataatctcagtgagcaaatggtgaaactgatttcgattcaccctgtacaatgaattccataatcatttttacaccttggcacattcctccaacagctccctagcctaactcattcggattactgatggccaatccgatcgacccaacgtgagcatgatcctaggagcgacaaatgtagctccctaactcaatatatcgtagtttgattaaagaaacagctagctggatttagaccaaaataagaaatgtaaacgcaattaagtacagtagcgatagaaaattaagaggctgctcattatcgatagcgttataggccgattcaaagtgttcgagctctcgttataggagagtgagaaaacggataactttcaagaaatattactatagaaatcgggtgtattagatatatgatgaccgttatacacaacgacctcgaaaaaacgtttttacttatttaaggaaactattttatttaatcgattactacctcagtataaaagggaggtactgtttattagatttaattggcttatatatctctacttattttaatatctgtgtattccctaataccctaataccccctatatctactagcgagaatttcttaccctattcttataagattattctcagccgtttactaatacctaatattactatatacctatctttactatattactatggcaaatttttagtcatctactcgttagagaataggctagccaagatatcctatagactcttaagtctagttatatagtcgctcgtataaagcctaaagtagtgtaagtaaaatgtggtatctatatagactataggggtatatatatatattacgtgctttttactagattaccttatataatatatattatagtgtacgccccctagattatatagtatataagatagatagaaatataatctatatagaaccatataattaggttccctttaaacgtaaggaagctatattcctttacttccttgtataacgccttttatctaaagtcgactatagtatctcttaatattgattatttatctacaaaacttcccttaggaacagagtagtagtcctaaggatattctagtaatcctagggtagactgatattctaaaagatagagttagtgctcctaaaggcagagtcagtattcctagggatatactagtaatcctagggatatcctagtgatcctagggatagagttagtattcctagagatagactaatattcctagagatagagtcagtactcctagaggcagagtcggtattcctagggatagactaatactcctaggaatagaccagtcctcctaactaagttaagattatacacaaaatatatatactagaaaaaaggaaatacttgtagagttataatattaataagtaataaaatagaaggtagggtttatatatctttaataatagtaaaataagaattaataaaatactaaagaatagctaaaggtagtaagaatatactagtaaaattttaaggatagataaattagcttagaaatccgagtataaaagttttattaaatctttcctaaatttaaggggtactagttataaaatcatttaatataataaggatttatttttctaataaaaagataatagttattttatttatacctatagttaactaattcttctaatatttatatatatatatatcgtttagctctaaaataaaattctagtataactagaccttagcttaatatattattataatattattaactagctccttaaactttagagaagctaactagtttttagtatagtaggtattaatatagctatattaataaatttactagagatagttttaggttagtataggctataactctaaaaactatagtttctagagagtgatactagtttttaacgctttaaaactatagctatttaaaggttttcagaatccctaagaattacttaatctatatatttagttccctaatctctttagctattcttaatagtagtactttaaggaatctcttagtatagcttctatacctcctacctattctaatcgatcttactctattaaaaagttaatatactaaaaacgaggttattataaattaagcttaataaaaaaagtgtctaaatatagtaagatatataatatagatatctatataggtatataccttcgggaaaccggctaagtatttatcctattagcggatactttaggattttaggtattccttagcttataattagtatatctctaactatacctttaataaaaagataactaaccttttaagaattcctactatctatccctaatactagtaatagactagggtctagaggagcttaataaagatatactaaaataatatatataaagttatataactaaaggggaacttatactagactagaatatttgcaattaatatcttatatataatattttctatctataaattagaatagctattatattaatagattaggaattagtaaggccctaagggtaaagtataataacttatagttctaaagtagaatctctatactaaataaagagttcgcggtatattcttatataggttatttataactacttataggcctaaggataggggaaagtagatagcctatatagttagcctatagtatatataattcgagcgtagtatagataaagtgacttctagaggtatagtatagaaaaggctatatataaataaatgagaagttttcgtaaaggttagagaactattaactagttataaatcgataaggtatatacagcctagaaaatatggtagaaataggcttagtatagggcttatataagatatttctaacctaggtaaaattaattttttactctagacttaggggttacctaggtattaggaaaaatacactgatttagagtagagactactatctacctaataatatttaataaatactttagttatttaaaaggaaaagaattatttcatttttcctaagacaaccgattatttaattaacagccataagtttacttactattagcccttagttcttaccactataggccttattcttattcaattaagcagcttatccgaatatataatattcttatatattataatattatttatataactatataggtttctttaaactatatctatcagccttagaatttacgtatagttatctacttaggatctaagtctaggttaagtattatatactttaaataggatataaataaattggtttttttttctctctaagaactttctttctatcttatatttctaagtaacttataatttaataattagttataagtttacctactagttaagagggtatataaagtggtagttaaagtatagtagtaaactaagggccccttccctacctaaagtataagtctatatattttataatctatttatatccctagcttactaactaaaaattattttaacctacttactagtacctctgctctattctaagattttaggtaagaatagagaacttaaacttatttttcctaagttatactaatactataatctttactctatattctaactatcttaacttatagtagaattagacttactctaataaggtaactatattctaggctatatatagctatatataggtataagaaatatatatataattacttatatatattaagcctatagggttaagaatatattatattctagccctacttttatatatataaactagtattacttctattatacttataataatagggcttataaacctccctttatatatttagaaagtacctatttatatatagtacttaattacaatctctagatataatctaaatatctataaaatagctatatagtatctctttatagctcttttagaaacttataaatatagaagaccctcttattagactaaaaattcgttttatatattagtaaacctataaatacttatagcctaataaagtctttttattatatcttcttctagtatttaaagctatttaagtataagctagtatattatacctttaacctttaatagcgatagcctttagagctttcttaagtaaattaatatactagctttaagccctaagtcctaagctatattagttataattaaagaatttagctattagtataaataggtttttactagaaataaggagttaaggaaagcctaaaataagatctttaatctaaaggaaagaaagtaagttactattaaggagatatttatagctaataagagggaaaaggtaaagtaaaaagaagctcttagttaagttaatttactttatatattagttaaatagaaggactaatcttttactaaatactctaagtaagtataagagctctagtagtagatagataatcttaagttatcctacttattagagcttagtaaagtttcttaattagctaaagatattagtatactttaatagaatttaaaagagaaagataagattattaataaaataaaaactattagattaagtcttaaaataatgcttttattaatatagtagaaaatagaagagttaaaagctaagaaagctatactaaataaagaattataaataagctaaggctaactctaaaatatcgaaagctttactattctataattagagcttaataaaagctcgatataagttatatataggtatttagcgatatttatatactaatatattttacctagtttaataaactttttagatctttagatttttactctaaataagataactactatcttaaaggaggatcttatagaaaagatcttaaaggtatatatatatctagccctttctataacttatctacttatttatttatcctaaaagatatatttatctaagaaaggctttaaaaagagaatactaggttttcttagtaatatatccctataatacccttaaacttccctaaagctaaagggatatacctagctataaccttagctattcttttaaaggaaatttataaaaatatcttttagcctaattatattttacctaaagattctaaaatctatagaatccttagttaccttactaagaataatactaagaaggaaagtttttaccgatatattcttctcttacttagtcttaatactaaagagagtcttctctaaataagggtttagataatagtctataatatattattatatctatagaaaatactcttagaaacttagtataatttaatctatataaatatagagaggattatataaaaagtagctaacttttagcttttaatctaatatacttagtagagatataagatagagtttaatctaatggctaacttttagcttctagtctaatatacttagtagagatataagatagagtttaatctaattaatcttaaagataataattagaagccttttcccttcttaagagataatatagtcctaaattactaaaactaggttacttaagatataaatattctaactatatttctatatatcttactagtaaaagatagtaattataacctattaacttagataacctagttataaagtttatagaagctttatatagtagtagagtataaagctagttaaatattaactagcttagttattccttaaaggttattaacctactctagatagaagtctattacttataataataagtaactaaataatacctcttttttagataaaagatagctatagcctttataatttaattaggaaagtaatccttatacttatctatagagttttatcctactattattagtaattataaagtaagtaataaatagagattagggattttttacttatatatcttacttatacttattttattctaattatataatatttatttaatagctattactatattaactattaagtttattatagtagtagtagtagtatttatttatattaacccttataaagtaatatataagtttattataggtccctaaaaatatctttattattctagtaacctaatttagactaatagtactctaaataatagtataagagaagccgattatattatattaactagactttagcttaactaatttcctaaattaccttttatagtaccacttatttttaagtctataaataattattttagttacttactagtttatttaaggatatagagtaatagaggtttctaaaatctttctttaagtaattttatagcgaaaagctataatagtctaactttattattaactataaataagagggactaatataggatataataagctaaaagtagttagtatttctatatactctacttagagtttcttatttaaatataaataatctataaatatattattattagaatagtaaagacctatatctaatatagcttactttaatagactttattataaactaagtttattctaagtaatactaactataaaaaggctggtatagtataggaattaagctatattattagagatagtttttttataatatctataaagaacctaattaattatatatttaaactatacttatagtatatagtctcttatactttattagaagtataaggtatatattttagttaccctaatcccttataataaaagttaacttctaaagtagactaaaatataaatctatacttagcctagttagctatagtttagaatagtcttataagtataaaaaaaaaagtaaatatttaatctactaagttatagctaccctatcgaagtataactatagtatatactttattaatatattataatagctattattctttatatctaatctaacttagtagggccctagttaaattattttataacccttagtttatatatccctaatctctttctccttctcttttcctacttattttatagtatattctctaaaagtaaggataataattattatagttatctatagtagtagttttaaagtacttatatctaataactagtctatttaagagatagctcttaatagatataaagatttacttacctaataggtagaacctatttagactactagataggctatataatatcgattaggataatatatatctatccctcttataaaatatacccctccttatccctactatctattaatttattagtataacttagccttaggatatataaaagtcttatatttaagctaatataaagtatccttagtagtctaaattttagataccttttatactaactagtataactataatagctattaaatatatatacctttactctataataatagataatactagtaaatagtattttagaatatactaaactagatactagatataaataaaaaataagaattaggaactttagctttttatataactatactttatataagttagcaattagtataggaaatattatactttttaaggaatagtataaataatttctttaaatagttaaattacctaaagagtaataactaagaccttctatataagataccctttattctatctattaataagctcctactaaagataaatattaaagttacctctaggagttaatacctttataaggtttagtaccctagttactatagagtaatctaactaaagattttctttagggctaggtatactatagataatactatattctaaagaataccgaatcactctaataaataacctaagggtatctccttcttagactaaaataagggggtaaactataagaaagatattacctttagattaaagagtaataaaaatagacttattctatattatttctacctttagctataagttaaagaacctactaagtataatagctaatagcttatataatccacttaattagaatatagtttcctctatattagaagactataggttaatagtactattctatatatttttaggaatactaagtctatctactataagtagttagcttagctatagtctttctataaaattacccttactttccttagctatatattcttctaactatttaatatagaaggtatatctttcttcctagttctagactatctctactaaaaaagccctagattctaataagtagcttttatagaagcggttaaattcctttatataatataagagaattttattaatacctatattctatatcttaaacagttatttctaaaaaagatagtactactattaattagtaagactaagtctataatctacttcctatataaagtacttagtagcgattttcttagctattataaatttattaaaagagcctttagatattagtaaatcctttagattaaggagcttagtaccttttttaataatttcctaatatatagtcttattaaattaagactagatactattacttactaagaatatattctcctacttaattagctagattatattagggtattataacttaataatattatctataaaactctaaattaccttaacctttattattataattacctactttaaatagtatctatatcttttaagtagattattaagtttaatatagttaataaatatattcttaataatactttataatacttttctaccttaatagttatataagttagttaaaggtactatagttaggagtaagtttatcgctatattcgctttattagttaatagggaattagttagtatatctcctaaagatagtatagtattatttatcccttatactattactttaagagtagtcttatcttttaccttaactttattcttccttttctttttataagatagtatatctagccctatatattctactttacttcgttttttaggtataggaaggaactgataagagctatactttactttagaagctagactagctataagaataggaggaagaggtagtagatctattattcctacttactatcttatttagtagactatatatattaatagaaagttactctaatagtagtctaggggcttactaaagttagaaatactaagtatatattacctaataggcttattactatagttactaattttatatattactagtagttcctagattttctctactattaaagaccgaaagatttcctctatagttaattatatagtaggtataaactctaactaagagatattagggaaaggaaagatattaggctactactattttcggttatataggaactactaatctatattaggtaatataggtctagactatagctaatagaataaaatagaaagaaagggaataaatagtatatatcttataatataatatattatctcactactagtaatttatctatatactcttcctattatagtattactttagtaatagtatattatataggtttcttcggtatatcggtctcttttactttcttatactctttaggctaccgcttcctcttaactttctactttactagttctaatttaataaaaaccgcctctctctaaacttaagatagtaatatagctcgctttaaaaaagataactctctaatatatctataaaatacctcgactttctatatctctaggtatacttttatctactaaaggactagaagctaataacctaagctatattatatattatattattctaattaaatatagatctttataaaaatcttcttatcttattaaattacctaaatctcctatttatattatatcctaaagctacagctttctgagcctaagatactacccttagtataaaattaagggataatctatctaagtcgcttatatattaaattaaagatatacttataacagaggatatttaaatatactttatataagtagaaagttaaggtatctaatatatattatatatataaactagtgtaaacgagcctccttaatagaggtatataagaatacctacctcttagagctttaagcactaatcctatactatcgtagcctctaataataagactatagtccttaataagtggtatataagttagtattataggaataaaggcaggaactctgcagtattactaaatttaattcaggaaggaactactctgatttatattaagataagtactaaccgctttaggatactaattatacttaaaatatatggcctcaagaatttctagagctaggacctactagtagaaagctgattggactagttctttagctaagctctaatacacttttattaaggtataactcttctattcgaacaaatcgatagataactgcagctctcttaaattataaagatatttacctaagagcaaaagaaggacggaagcaggtagaagaacgtgagaagcaatcataagggagacaaaaagcagaagagtatactaatatacctcttttacagagcttttacagtaccactatagcgttcgctcctaccagttataagttctattactagataaattatatagctagatttattagttttacacctccctatcaattaactgtaatagtatagaagatagtgatttctattatctatcagtacttcagtataaaatatttttcaactattataagaataccgcggtactttatactcctataaacttcactagtagataactaagctttatacagtataccacgtttatttctcaggctcctatatcgctacttagaaccgtgattaccttactctagattaaggtatatatctcttatagtctaatttattgcagggtagcttatctttcttctatatagggcgaatttaattataagtaactatatacttcctaatttagcggctctttatagtcaagcttcaagcttcttcctactttacttataaagcttctaatgaaactgtggactagtctgatacttagctctatacagcctctaatatactttttagtatagtaagtaggagagtgaaaggaaaagtaacagctattctttatataaagtctataggcacaaatatactataagaaggactctaatagacctataagctctagtataagccttaggcgatatagatatctacttatatctactgataatatagttatattatatagtaagttattaagttaggttattaaagataagttattaagaaaggaggggtctagggctatataactagattatattaatattaagtctatatattttgttttacttatattataaaaacagttaactagctaaagtggtcttaatctagcgcctatacagcttttagtctcttataactactaagaatcaagaatttcagttataatagaccgctgcacgtttttaatatctagtatcgaatataagacttatcgacttactatctattactatagagttagtataatagctagataggacaggaaattagtaactaatattatatatttccttaataaagaaataccctcttctaataatacagtctataatatagtctcgaaaagatttatcttaatcagtcgctatcttctatagaatcctacctattcttataataaggtaagttatagcggcagcccagatattaattagcctaggattaaattccttatatagatattgttctagcgatataaaagggtgtgaaccgcgatatatcctagatatatatatctagtttttctacctaaggcagaaacatttagcgctcctaaaatcggaaatttttaggcagctattagagctaagaagaagattctctagctttaaatcgcgataagtaattcctatcttataaatatagttaatactatatataagctgtttaaagaaacaatcggcctctaactcttctaaataactagatatagctactaaagaatacagatccctactagagtaatactctaagtatttataaaagctattatttcctatttaaagtaactcgaaagtctaaacaatattttaatattataataaaaaggatatataaaactcggatttaacatgcctctagtaagctatttcagttatttatactttacagcggaagattttaagtatataaaagcgataaatattcgggttctactcttagattttatgtaatagaaaaacggccctaaataagctatgacctagaatatcgtatatatccctatatttctaggctataagtgctatattttccccagccataacgctagttttttgattctctatctactatttctattctgaatccacggacagttataagtaaggttttataattatccccttctagtatttctagtttatctttcgattctctttacagaagagtcttttcgacaatagtggtcttagaaagtagcagtgatccctattctcaagtataaaccttttattcctaaagatatattttctaaacgtaatggttaggactagaattatactatcggttatctctatacccactttagagtagatagaagtttaagatatataagaataattgtatctacaatcgctaggacctctatattatcttcctagagtataagaactaaagtatttaaaagttaactgaagtagcttttaaagataaataggtatattcctatatcctaattagctaactaggcttactcttagtaagttaacgaaattctaacttaatatactttagtatatcaagttatttagtttactaggagagaatttatagataggatagattagatatatcacatatactttcgtaagataaggtagacttcctatatcgcactaataattagactagggaattagccactactctaaattcactaatacctagttcttagtcttagcaattctctgtttataggaactaggtatccttagtatatagagactgattcttagcgcttagaagttctcagcagtattgctattattaggtagactccaactagacttaccgcgattaggatatttcttcgattataattaaatatcggattataattaactactatctaatagctactaatcataaggcgacgtacccaccttatagatacagcctaacgtctcagcactaagcctataactagtaatagctcctataaacagtataatataggttactacctagtaatctaccgataaactaaagcttaatatagggcacttataccgactccttattataactaatcgcagatatcgtataagacctaataaatataaagcctataatccctatatagagcttatatctagtttaatactttagctagtagatactttaggtaagacagagaaataagcggcttagtaaccattatacctagctatagctagctacttaactaaaataatctctaatactagataagaaaaatgatatcgcgcctaactctaggtcaggcagtagtctactaagctagccagcttatatactggcttataaggatataattaaagaactcactactaagctagacaatagtctaccccttaacaaagtaagtcatcgtttctagcaatatggtcctaattaactagataaaggggaaggtatattgttagtcaagatttttgtacagtaggtagctaacgcaataatactagtaagagactgctatcctctttaattaagccgaggaaactagttaaaaattgtctaattctaatctagtcgtttattataggtactgattctagccatagcggttagttttagaattcagtcatagattaagggcagagtgatctatatagttattatcttaaatattgttattagattctttcagaagtataccgctaaaaagactatagagtcattacattcgctattattaccgacagggactatcttaagaggtagacagatattctcagtactattatctaagattataccgggtaatataattaagctaaggataggggatactattctagtggatatttagtaagatgattctaaagttattaaaggaattggtaggccttttactaataatataaaagcctagttgaaatagttaacttcgagactaataaagctcttctaataggcgagtctttacctatctagaaggaatacaactcaacttttaaagaggatactaggcctagagaccaccttaacattacctacagttctaataccgttatttatggtcgtaggtatagtatggttatcagtataggtatatttaccgaaattagttctattaccctcacattataggctagcggtagtaagcatcgtcctattaagcatagtcctaacggtaagactaagaagcggtagtatatttaggcctagactcttatatagatagatactataggtcgattccttagtattaatatcagaactctcttataaaggaagcttttaaaactagcctatttactatttagaattactattatatttaccattatttatatagctataaacttattcagtagtagtaaggaagttattatatatactattacaaccggtattagtatgattccagtatatctaatagttatacttactattataatagtagtaggtactaaatatatagttaagcggaacgtgattatttataaattagacttattagaggcactcggtactattatagatatttattccaataagataggtactttgacttaaggcaaaatggttatcaaaaaggcatagatcctatcttaggggatatactctgtcggctcgtctaataagccttttaatctaactgttagagatattacctacactcctattctacctttgtaactcattaataaaaaggaaggcccccctatagaaagtatagaaggtctagtctcaggaaaccgctagctagaagacttcttagatatcgcgtctatagtaaacctctcttacatttataagtctaaagagggagaatagtatatataaggtaaacctacagaaattactatttatatttttatattaaggtttaactagaaccgcgaccgctagactaagggttaaggtacagtatagtaccaaaaggctaaattcctatttaactcaactatcaaaaaaatgtccgttattttcaacaaagctaccctatataaggactatataatagtatttactaagggtacagtcgagtgtatcgtagccttatataccttaattatctaggactaggatttgttaacccctgtcctaataactaacaactaccgcgaaaggatactctagaatatagaggaactcgctaaacagggacttcgggtattagctttagcctatcgattgtatactaaccaggtataactacttaaaggttctaatctaaatcacaaagatatagagaatgatttatacttccttagactaattggcttatataattccctataccctgagatagtgggcttaatctaggcctactaccgggtaggtatagttatctatatagttactagtgattaccctagtactaccaaagcgattgcctagtaagtaggaattcttctagctagttttaatactatagcggctgatatcgcagatactatagttataactaccagtcaattcgataaccttactaataagtaggtagatacgcttccgaccctacctctagttattatacagtatactctatagactaaggtatatataatcgatgccctttatcgctatagttactttatagctataactagaaacagagtgaatgattctccttcgcttaagtatactgatattagtatcactatagggcaggtaggtttagatatagctaaagatatatctaatattatacttatagataataactttgccttaattcttaatactattaaagaaggtcgtcgtatctttaataatattcaaaaattcatactttatctattattagaaaatatcgtataggcctataccttacttatcggattagctttcaaagacactgataatcaatctatcttccctctatcgctagtcgaaattctctagattattataattatatcgggtatacctaatataggccttagaatagaggtagctatacctaatattataaaccgtcctccttagagtaagtagggtatatttacctaggaggtaattattaatattctagtttatagtatctagactatagccctctgcctagcagtattctctatctatatatagggattcggcgacagtaacctggcctatagctataataaggaatagttagaagagattaaagactataaactagtcttctaagtatatactataacgtttatatacttaacttagtttatactattcctagcttaggaaatagttaacttataccgctcgtttttctatatatagctaaaatctaagaaatactttacctaatagatatacaatatctagtagaataagttcctcttctagtctattatagccggatagatcactatattccctattctctatatccctattttaaacgatattgtcttcaaatataaacctattacctaggaatagggtatcgtagtagttaaggctatcctattctttattggagtcgaagcctagaaataggctaagcgagtcttctttcattatagagtgagaaagagcccgcacttaacccccttagaataaatccctaagcagccctaatatatactttccttagcctaatatcaaccggagctagggaataaacactatcttagtacacacgtattataggaaaccacttactagaaaacagaatattattttatagaaattacaggtatatagaggagaagggaaattctagaggaggtattataacagattataggtaggttaggcttaaggagtatattgcccctaggggttattttcttatacactaaatatatacttggttcgattaaactttatttctagaactttactaagaatacaaataagtaagaggagagaacttatagtaggtaaattatagaaataattaatataagggggtaggtagccggtagccttagaagagagggaatttgaagcagcgatatatagggctggtatactatataatcagagttattagttagtgccttacttcctctcacttattaaagccccacaactgctcagaaacacattgaggtcatcactgactctgagctcgtactaatatctaccagtgagcctaagtctaagcgcccttattaaagcgacggtatcccaagtaggaaatccctatccgccagggaaaatttggtatatatatactggaaagctcctgtcggtgagtcctggtcagggcggatcatgcttagtgagcaagagcatgatcgtggtttctcttttccctaaagcccgggagtgcctgggtataggatgtcgcacgtgacctggatgacagattaatcaattggttctcaacggcccgtcagcagttgaggtccccacatgtgattggtgactagcatgtccgtaacaatgcgatttggccttcaaccctctcgggccataagattagttccctggaaccattattgtcatgttagaacacatttgatgttatataccaatactctcaaataaacctatatcaatctttaagtctcttcgactgacacagcgaaggctagacacgggccggtcgtccctttgctcgtttttttacttccgctcttccgtgtggatgagatgtacatccgagcgcgtcgtatcctcgtcccaaatgaagccaacttcaatctctttatctgtcccagattcttatatattagtcgaaagattcctattataacattgttataatagcacaacattgtcatacagaaatttgcgagcaagacttatgagacttccttcagtcaaacttggtttgagccttatccctatctgggtgatcttcttctaggcgttcgcctgggagaacaatggcacggtcgagcttgtagggcagtccgcggtgacggcctcggatcatcatcacacaaatgacaagcttgctgaaaacggtaaactttccagatagagacgtagaaacagttggatacccaagactaagtccaacgttgccacttaatcgaaatcagtcaaggcaaaaggagtaaataccgcatggataactcactatgccgagacaacttcgaataacacagaaaatacagaaaaggcctgaattggttgaattttagtatcgcgaaatttgagaccaatcacttactggaattgacgtatctgcgatcttgccggcctcggcgacgcagatgcaaaagctgccgaggaaaatgtaccacaagtcaaaggtcagttggttctgaatatgattgacaatgtaagaccggccgttatgctcgtcgatgttaccgtcagtggtatatacacccagcgttctttcttcataaacattggaagctctgatgctaatggcaatcggaaaaatcgcaatatacatcatgaccaccaagctgaattggacggctgggctcacatcagccaagttgaaagttgatgtacccgtatgacgcgacgatgcggcttggaaaatagcagcgaggactcgaggaccgggtgcgagattattcacggcgggatttttcaagtccagcacaatgatgagaataacatcgattgagttcataaggaataagattccgaagagaatccacgtcggcccgcttgggaaaagcagcgtatagcaccgtcgcggatgatcgagcagaaatcttagtggatctttaagagaggatttagccgggcaaaatttgtagaaaatccagataataagtcgaagaaggcacggataacaagtgttcccggcaaatgcaaggaaactcataaggatcattgggaaagtcgcatcttgaaacgaaatcatcgaatctggtgttagagtaaagccaagattgtcaatcatcgtctgagaggagtaaaagcccctatcgcgcggtaaacgagatcagcttctataccgttgattatagttcatggagccgacttaccaccaaacattgccttgcccacattcagcaaggtaatcacggtatttcggatccgcgtgcagaatccaccccacaaggcagattgcaccgaataaatgcagaccaaagaaatatccaacaacaatttttaacaggagcttcaagcttcgatactcgataccgccgagtgtttcccgatctttggcagacagattatggaaccgagagttccggcctattgtagcttgtgaagacatatgcggcaaattgagctgctttatgtccctccgctttgtggttggcatccctcggtcagagctagaaaagcctcccaaaataaacacggaggttacaactcgctcaagggtgtgagtacgagactgcatgcttctagtagtcggtcgacgactaaggactttctcggttcgtccttgtaagaaccaggttagcgaagcgattaacttggagttacgtttaggcgcgaccttatcaggactaaccatcatcttcatcatgaagcctttcatcaatctcagaaaacgaggcacctgtatagtattgtgagaaacggaggaagatatgaacctgatttgtgtatacctctttcacgtttccacggaggcggaatatacagagctttatccttgtcggaagacggccgattgtcttcagcgaatgtaatggtttgctttgtcggattgatgttcgaaaccgctgtgtcatcggcttttgcatcgttcaattccagggaaactctggtgtatgagttagtacccattacgtttgagagtctgtagctgatcgatggcatcgaaaccaacctcgaaaatttgtcccaagtctcaacacacgccttttctttttccgagtcgtctatttcgtggctgctaaattgatcgttttgggcttcatcatcatggttattcaaactttttttgtgcttcaactgtgcctctgcgtcttgttcggggggagcctctggtctcaaaaggttcggagctatattttggagaagcaagttagttctcgatgatggcgttgggtagggggttaggtggtggaagacttctaaccgattgctttgaagcgcttttcaaaccatcgaacccgaaatacaattacgatgatgttgatgaaccccaagtttcctaggatcggaatgaggtataggtacacttgttggtaggtctttaaagatttgacgtcgacacttgacacccatggaaagtctttgtttagccgacttataaggatggaaaaaataacaataaaaactcacgtatttagacctgactcagtcgacgcgctggctccgaaaaaataagcatcgacagctttcagattaccatgaggatatatgataaccaagctcagaacgctgagggtgataatccacgcatctgcgaagaaggattagaaggggatattgtgtaactgccgatggacatacaatgcagggcgagaaagtttatcgatggcttccacatggcacaaaactcgcaggattgctttaggaagggttctaaagggcctgccaaattacattatatagcgcaggcttatcgcaatttgaataattaccgatacaacataaaccagagcgatagaaggatttgagtgtgagggatttgctaggcaaatcaagtttggccctgggtcgctgcttgcggcttgactaactcgcttccgtggctagcgcgctcttcgaataagcgaggctgagcatcatatagaaagctttaccccgtacagttaaatcagctgcctggggcttatttttaatattctagtaatatcattggccgaagtgtctctctcgtagcacgcattgcctggtagataacttctctttctcggccttgcgaagccttccattccagcgggacaaagagatatcaagcgactcgctagtgacagtcgacgtagcagagggccaacgagccagacgtaatggctcgcttttctaagacgatgttgacgaagattggtcaaccattaagaaggtaggcgggtagggtgctaagacattagcgtgggagtggtacgaagaataccaagttctcctgaaattggtagattaagctccgctccattaattttgcaatcgaacctgtgtttgtcaaaaatatatcatgtcctctgagccaaccgtcttgatgggctatctacggcatgaacttcttttgggtcactaatccacaaaagcagccccgcacgtgagcgctaacattctaagggaatccacttatgtaaacatgtcttacatcttgtacagtagtagaaatatgatgatcatgatggatctgtatggcgcaaaaaaatcccgctttttgcatcaaatgactgtttcccgccaggcaaatcaagggaatacttatatatgcaagttcaacctctctgatattacaataccgaccagcttttgttttatataaaatgaaaggaaaatatgtcagcgactccaaatggcccaacagcctccactgctgtcaccgcagtcatatgcgctgccttgatcattggtctatggtgagtatttaccagacattatcaacgaaccttaaagagtcaaaataacctgtctatttatctagtttcgctgcctttactcgttggttctgttacatccgaagacgttccacagaaggaaatcctgcggcagttcctcctagcgttttccagctgcaggcaaaccagtccaaagtgcaggagaaacctctgaccgtagaggacctcaacaaatacctacccatgatcgaatacaaaatgtggaagagccaacaatacgaacaaaggtgccatgtaaacattttatttgcctgcggtacaggcttgtgctaatgagtgacatagaatgagcttccctcaaactgcgactgaagctcagaagaccttgtcggaccccaatgtatcagcactacttccccaatctcccaccgaagacccagtgcatttgtccaacttgaatgcaagtgtcggggctcaaggtcaagtaaacctttctgaggaagttcggagtaaggacagacttttcgaattctctcttaccccgaaagcccctgaaagtagttgtcagactatacagagtgccgtatctccagtttggccggtagaaaaaacggtttccggtgatgcatgcgctatatgcctagataccatggaagatgagatcaaagttcgcggcctcccctgtgaccatgctttccatgttgactgtgtggataagtggttactctggcgtcgagcgtgctgtccagtatgcagatatgcttgtaagatacctccgaaagtgatgtaaaaagaaattggatagtatattgcttctttggtcacaatgacctgcctgaatgcttcatttccgaaggtgtgtccaccccgcaagaggtatagtacgtagtcatcgccacgagagcgatgtctgacaacaaagattggtttcgcatcaaaaaaaagaagaagaagaagaagaagaagaagaagaagaagaagaagaaaagaaaacggacgacttgctccaaagccaacaaatcatcgatacgtttcttcacctaattgttttttgtggctcggcacaaaagaggtggggcctagtagcctgccatcatattgggtgagaatacttcggtgtgattgtcgagcgtacttcctagctttagattacagggatggctcagactcatctgacagcggcgactatttttttgccgcgtgaggtgaggcttggtcacgccgttcggtttcccttagtgcggacgatataacaggatgggtgaccaaagcgtgcttatctattggcgagcactggtcttcatggggaagctggcgggtaccgccgcaaacgatagctagcacacaaacccaggcgtgattgtgtggcaaatccctcacgcaaatacgccgctgtcccgggtagtattgcatgcggcaattattaaaatcacgataatgccgcaactatatattgagtttggcaggcctcttctcattcttccacctttgtacagttcggtgcgtcttgtactatgtggaaaccaccaataaagtatcacccgtgcatcgtatgtgcattggtaacttctaaccatcactgacagacccgtggattatcaccctcagcgtgctgagcttggttatcatatatccttatggtaacctgaaggcagttaatgcttatttcttcggcgccagcgcgtcggccgagtcgggtctgaatacgtgagtgttttattatccttttcgatctcaatggtcccgctaaacgacgatacactgttgatgcgttgattttcagcgttgacgtcaagttcttggagacctaccagcaaatatacatatacctcattctaatcctgggaaatttgggatttatcaacatgatatgctacattgaccaggcaagttttctgatttggcaaagggattctttctgcttccgccttttcgttctcgttgacagcaaaggtctcttcaatagcgattgttttcgtcttctttatatcaaggatctcgctttgggcttttcttcaactcctcatctctggtgaatttgttccgctgttgggaaacctcattaaacacggctggggcgattagagattaagagcttgcagccagtactctgattgtttgaaaaagctaagtggtcagaagagatcaaagactgcgaactagtcttccgagcacgtgccaccacgttcgtttgcttaacttggtttacactgtttctggcttgggagatggtcaacatgcgccgctcgttcttccgcatgcagccaaaatccaaaaaatactttacacaatggatgtacgatgtctggcggaacaagtttcttttctgttccatctggccggatggatcaccatgttccctatgatctatatccccgtcttgaacgacgtcgtcttcaaacataagcccatcacttgggaatagggtatcgtggcagtcgaggctgtcttgttcttcatcggcgtcgaagcctagaaatggaccaagcgagttttcttccgtcgcagagtccgaaaatcttccatattgagttcgtccagggacgtcccggagcatccctaacaaacatttccctggcccaacatcaattggggccggggaacaaaccgccacatggtgcgttagcgcacatatcatgacttactagagacttactggaaaaatcaaccatagcaattgtgaataccgggtatcgagagtggattgtggaaatttgtggatcaagggtttgagaacttccttaaatggtgtatcgacaaggtgcgagcaaagcaagacagtgctcacggacatttccggcacgctggtctcaatattgaagtatttcataccaaatgcgttattttgtatgcatttttccgccgtcggcacttgcttatgttaattcctgacttgagatgtgaccccatgctcaatagtcgcgtggcaaatccacatttcatttgacaaccagtgttcatccatagacaggcacttaatataagctgaagcatattgaatttgttatacgtttcagactacagtgtcccgcttccggattcgcgctgaccttattacatatgtataagacaggcgagggagacataacgctaccactagatcctaacttttattccgttaagtcgggtataagaccgatccaaaccttatgatttttaagtaaggacgggcatacgtcatataagagattctagtaaagagatgacttcattagagatagactttcaaattgtattaatatatatatctaacccccaggtaataaacatttatatatttctcgctattatatatcctacttaagccaatttcaccctatctctttttaaataataaatcgttatttatatattctattatccaaagaaaagggcctattaacagtatataagctattatttacacgcctaccatattattcaatatatcaagatcgctttaactgtggtctattaccctatacaaatttcagcctaagcttaagtctctaaaataacaaaataaaccagagccgaaaactaagttatatatagactattaaaatactatattactccctctaggcgaatgttctatttacctggaagagctaggttcaatagccgtctttcgccagctaccttatagctatattatctattaaccttacgcagatacctagctttatattagcgataccagctacccctatatcgctagaggttctattatctacgaaagccacagactctaattataaaggaagcgcggtctacaggttatagactaagttcgctacttataggttataattcagtatattggttctagatcgtaaaagcctagtttaggagaatattatctaggagcctagtagtagccttcggttcctataataggagttgatactttacttataaatactagatttttttaaattaaatctatatacaggaggttcttagattaccccttatttatttaagcagtcgttcttcttaatacctcttactatcttataagtcctctaccatctactaatataaggtataataatacctagtttctattataacatttctatactactataagttcaactaggacctttattatttatttcgacttacctacgatagatcatggcaatatcccaacttcgaatagctcgctacttagcagagtgatttcgtagattcccacaactttcctaagggtagccctattctacacgtactctcgtctatactataactaaagtaatatacttatataatataatatatttagtaaatatataagttagcccattacctatatctctgcctaataggtaaaacggcagctattctccctatatagataattcttctttagcttcccctagtaggaatccgaataattgactataatcttacttccagtagtcactccgcgagagactataagtatatattctattctacattagtaaaacttctaaaactagctattagggtaatataagtgattaataaagtaagtaaaattacctatttaaccttagaagacctaatatagtcgttctgggcttccgcctatcattacatctagaccttcaattccttaagtaataaggccaataaactctacaatagctatacctcggtcgaattccttctaaatattagtgattactatattaagggcagttagtaaagactagataggatatctacatataatatatatagcaggtaattaccctattattcttcctactagctatattatataactagataggagggggataacgaataccactaaacaaagccaagaaataagaacagtaattagagattatattatcggtctattattccttatacagtcgataaatattaggatcaatttcctacctatatcgagggttatctccaccaaatatactaggatcgatcatacagttattcataaacttataattaaagccgtttagtaatattagatagcggtaggtggttttaagcggtaatactagcctagtatctagcgtaacctatttataagggtaaccagagtatcggtaagacccattttagctaataactcagagaaggtcttactaaccagggtagagagtatctacagtaactttaaggttagaagcgatatagtataaccaagatataagtccgttatcaaagcctatcttatatttatatacacaataaataccggacctagtaaatattagactagcctaatccctagaatctttaatttctttatagctatactaaaccgccctagagaataatcaataataaattctaatatatagatataaggaaggggcgtttaaactatagaccgaaagaataacttatatcctatttctaaactcctttttatactatattaatataatataggcttcttttagagctactattcgagcttcagtattcgtatagcttaggaacttaagataaattaatataatctatactttatagcattctacctagtatacttacactactatttccagagcctataataaccggctctagttatagtatttcttatataaaccattaatagcccaaaaaacctataaatatcgctattaggatataataacgcctactaccctagtagaaagaattcgtacatactacttaactaatactagttctaagactgaattctagtctatagtcctatactctagttagtaatagtggatttaactagcgtagacttaatagaaaatatactagaaacgagatactcaaagtaacaggggaatatacttaccgctagatccctataataaatttatctatagaagaggactatagggtaggaacagctatatcctttataggcttcctacactaaggaaagtaggtatcgctatgaaattactaaactaacggttcgattctaatattagatagttatagacaagttccggtatctatatcgctatctaaccctaaatcctctatcgctactactatagcagatgattttaacggttgtagcctactaacagtcttatatctaggattgttaaagctatccttagatatagaggtcactggatacctatagctagattataaatcagactttaactattctaaggatctctatatcagtgactaatagcctctaatctactatcaatcgctatacttactaatactagggactttaaataggtaacctagctaggcgttatagttaggatctagttattttctacctttaactatccctaaatagtattattaatataggtaaggcttcgtctaagaggtttatagatcattttatactaaaggtagcgaattgtcattctaagtagttattttcgatttaagactattcgaagtatatactactatattaatatataggtagataccattatataggccaaaagaggccagtataaaggctagccggctagtaaaatctatattctcgaataaatcagacaactttttcacaactaggtggtatacaatcggatatatcgtcagtaagttagttattacctaatgtgattagatacagtcgcctatacctataagtattaattctacctaggtagaataagataactcagctaattctaagagaatctaggcttagcttagtataaccttacggtaacgtgataataggcttttagatctttcggctctttaataggaaacagatatgtttatactattaggaaggcaataaaagtatataggttactaactaataagctaggtcaaataatatattaagcggtactagcttatatagatagtagaaatttctatctagtaaaggaaaggggcttagaatactatatatactagtggagacctatataccgagaacagatggtataagctttaaaacctgagactcagataaatttagttagggtatatttagttagggctattagactagtaactagtaccctactcctagtaggctcttattattataaagcctcctatcctactcactgctatagtccttctcttcgtttctactttcttatttatagtattcgtaaacagctatctataataccgatatccaagtatcctaaggtaccctctccgcctctactaagagatatactatatacctcttatacttataacaaccttatagggtagaagagtatatatatccttcgaatcggaagggaaatataccacaatatctagaggtatcttccctattactagaataatatctataatatatagatatatagaactatcgctagtattatatatatatactttataaagtaggttaccttagctcacaactaaacttaaagctaatatatattctctagtatactcctagctatagcgtatacactagatatataccggagaactaggcagttttatagtattaacgaagcgctcttcttatctaccctagcggtaatagtattcagtatccttatagtacaacctcttactatcgttagtattacagggttaatttctttatttaactatactatatataatattataaagatctataaaccctctatataccccgaatttatatattaggtaggtatatagggcgctatattctattagattattactttatacaatatatatgactatatacactacgctacagatttcttaagcaaaacgttcggtttttatatcggaaccatctatatcagtaagttatacttccgaaaactaccttcttaatattaagaagaataatacctaactctaaggctaggtaagggtatagaggaacttatcagcgagttcactagtaaggggtataccgctaggtttataagttatataatcgtaatactatatttcctaataatctatagcctagagaccattaggtcgagtactatctagaggcctacttttcaggatttactagcagattatatatatatagtatatagagtctaattatactaggctactatttagaatcacttacactctttcttatcttttctatatagattagaacaattttctggataggattttcgtatatcctaggtcctctcaaagttatagatatatcctatattcctattagtaaagccttttacctaatatagccgcaaggctagctaatttacttttaggaactagacactaaatagatttttatagcgctactatttagatttctgattatattacttttctattataattatatataagaccctatctagggaatagagtcttactcctagctataacgctaactttatagctagaacgtcagtagcctaacggtataagtacagcaattcctactaaagaagcctactaggttctattaggacttttttcttcttagatataccacctttattttaggtattattagtatccctttccctaacggattggttctataggtataaaagctaattcaagtcttcgaccctataccgaaattattaataacctatactaggcacctatatatatagattctttaatagtatataaaacagatatctatattatactaactaaggaaggaaagggcgccgagatccactgtataatagttaaggcaactacggtagtagaataatatatatcgcatttcgttatagggctagctattattaatactataacaggccccctcctaatcatcctctatactatacctacagcggtattcgtaggaatattttttattataggatagggttctattagatctagcggtattatatagaaagcgatttacttaatactagaggaccgttttatataatataataaacctcttctaagggtacagaaccgtaaggtcctactatagattatatatcagctcattagaattacagcctatattactatctctaagacaattactactattagtatcctctttcctcccgtctagctttactaaagcgaataactgatttctatttttaggttttcctatattaataatcgctttaatcctattctaggtatagattattcctaaatggttttctagggataaaataggggtactagatgatataacggctaataataaagctattctagctagtcttagtagatcacctaaattccctagaaaggagcgtctttaggactataggactaagcgtcagtacttagagtagaagaagggaattagtagataataagccagcagtttatatcgttaaggtaggtcaatttccctaggaactaaggactcgctaaactttatatatattaaaggacttccctaacggatattaatattattatagtgctctaagtaggccaagtttattacaaagattctaagtacactaagctcttcgctctaacttttatatcctatttatataataaaagcacatcattttatattattatagcttacctttatttaaatatagtaacttaatttaaataataaagtaccgattagcttatattagtactaaaggtatacgaaaccttatggttaaggtatactaagagggtaagtacaagtattaatagttataggaaaaagaatagtagaggaaactagtccttataactctaatagtagaattattatagaccgaagtaatattaagcagtaatttcggataaatatatagatagctgatattagatcttactctagcctcctctgtaaaagtagattagaccgctaagcaattaatcaatatctgcgctttattataggagaccattttatactaacctttaattaagttgtataatcgggtatcctttagtccttctataacactgtcgctaatagtttatagaatcttattcttaataataacatttatttatatatcccaataatgcctaggagagctatactctattaaatatatgataaatagtatattattacaattatcggtcacttttatctctatatcgctttacttaataactgatattataaacgaaccgccgggctactcctacttttataccttacttaataaaaaattctaggtcttagtcttcgaaaatttgcttaagatcaagacagctttcgagtgctatatcacatactttctatatattctccttaaaggcttcgctacttacctataactagtactagatagtatagttatttacagtaatatcaagaagcctaaggataataatagaattaatatagctaggcgttaaaagtataatatcattactagtaggtatagatattaatacttaagattgagctaggaagatattaatatttattataaggtatatcgatctaattataggattatctaggcttttcttccatcttttaagccactggttctcctcagtataaagctatttataaagactattcagaacgttattataggtctcgattactcctccttaatctatatatttaacgagagtttttatataatataatcgtaatttatagtgttttcttctataatcctactagcagtattactaatataccctataattctataagatcgcgcagactttctatacaaaaccatagaactataaatatagatctttttctatattatagtaattagataaattaataataaatagaaacttgactaataacttaatattactaatacagttttatacctatataatcgattagatcctctttaggaggtaagatagggaaggtaaggccaagtaaccagcttatagttaagtaactaaaattaactctacctattactatatagataccttcgcttttagatatcagcctatctatagattatacaaataagcttaatccttacttttatacttgatttcactttaaataagggtttcttctcacatttttcaggatacttagcttattagttagatatatcacaatatataccgtacccttataatacttctacattctatatatagctatatccttctacctaatatatctataccgctctatacctactattactatagcctaggttagccagaggagtacactacattccctaatcaccccccttaagcttgtgcgtatagaatcgaataaagagactaacgctaactaggctaataatagtattcaaaagaatcgcctagacactagtgtagaaacctttatcactaatatacagagtttcgttatatctaatttcaattattaggagcctaatctcaccgcgtactattatagtagatcctaaaagtattacagctagctaggcccgtttctatatcttccccttctcctaatcgctttatttaatacttaggatctttttcttaacttttagtttcccctatattttatactcttcgtatgactctttataggattttacccctaaagtaagttactatataggtacctagattctaacgataaactatttattattttagttcgattacttaggaacaacttttaaatatattagtatacctttataaacgttattaggagggtaaaaacaattcctttctaaatatattccttggtccatagctctaaaaacggaattgtaaatctaatacttaagaagaataatagttccattaaatactactagggccctaacaagtatttcttaaaggtataaataaaagtagggcttttatctaccttacgctcaccctcctcgcggcttagaataacaaatggtcccttagggtacttactcagtatatatataagaaatatacccactaggaaggtaccaaataagacagatataccagtaaagctagcgatagttataaaagccgaaagaataagggttataaggataatattagagatatagtcgtagcgcataaagcgatattcaatgaactttcggaaaaatggtataaagacccattttgtaacaataggtattacagcagctatacctatcgataccactattagacacctaataagccatcctaaattaatactatcgctacttcctaaaagtttacctaaatctctaattatactatagatagttagcttaataagtttattataccttatctcatttcagataagtattataccttaatataacaagtcctataatattattaataacagccgcgcttactaaaactgaccctactcgagtctcagcaaggttaactaaataggacatagagctgatcacagtaaaggtagtccctaaatattttttagtaatagttaaactaacgcttctagggggatagtttaccaagtaaagtagtagaaagagatatactaataataaaggtctcaactatacctagtctatattaactgataactaaaaatttagggtaaataaaaccaactatatctaaaaccaagaaagagcaaaaggtatgaaatactaataggaaataaaaccctagttacagcgctaattatacttaaagtaaagttctacttaagtaagtctacacaggtactaagaccgcctagaataaatgacatcagtgtcctaagaagctaagaagccaagtagcgaagcagctataataaaaattttcacttaccttcgaaaataatcaaaatcagcccaatatatcctaggctaacaaaagtctcttactagtgatattaaagaatattagctaagggtactctgtagataataccgataacgatttaacctataattccagcctagattgcggtcgcggagacctaccttataagggaaaggaagaagaagaaagaaacgagaataaggattttaataactgtaaatatagattagtgaggaaatgagcatagatcaatcggcatataattaggtatatacttcctggttcgtggtataggaggaaactaccggctatactcgagtttcgtctttagagtaagatttaataagattaaataagaaaattggagaagggctgttagaagtaaactaaggacctcctcctacgtgacacaaattcgtgtccacctgttcccacggttccatctgacgccgaccttttgccccaatcttgtcctagtccgctcggtcataggcctttcttattttggatgtggggttacgtggggccgcgaggttctattctgaataggttgcccggtgatctgacccgtagttctataatttgatgagggggttaggcttttcggttactgtttgatcgattgtggacgtccacctggctaagggaccaatatgttactgttcctcgtgggccataggcttctaagaaaccgagcagctcactcgcgtcctctgtgaagcgaggctaaatgtggttaccgccctattttggttggtagcggttgaagtctccggttgtccttctttcatcccggatggtggattggattgcgccccgggcagttgtcagcgctgatcctgttgatgcctcgtgcggggtgtgtagtggcacttgttggcggtagactgatcagaggagaatcagagagtagctgaagcgctggctaacaattaacgatcttttcatggcggagtggactccggggaaacgattcggacttttgattttcctcgcgttgctcataaagatgaacaatcacattatgtatacctgtagttaccgactgtacctatgcgaaagagttcggaggtatagctgatttcgaaaagtactgtacctatgcgtcctatgggactgccctgatctgcgggagttgcggcgggaattacgggagaaagtcggcgacgcgtttaataacgtgtcgagcttgctagggggttctcaagaagaaaggagaggtcagatatatcatgcctcgcgagccaagacggtggatgctgtattggacttcgcggaggcatcacaaagattccgcagtcgcgcgccacgagggcagcttgacaacgtgaacggcaattaggccacgaaaggccttggcgaggctctaagttcgttccaggaagtggtacacttcgcttgtaggtacaaggatatatagtcgtgataattcctatgcacgctcttggtcgctcctaggaatcaggcttatcgttcctagaggacttatagctcccaggagtgggtggtatcgctcccgggaacgaggagggggttttccgagctttagtgcgttaagtaagatcggtgccggtggatcacgaatcccgggagcatgagggcttcctgtgagggtctcacgtatacgtagatgaggactgtgtttcgtaaatggataatcaatattaagaaaagctatagtcgactctagatacaagacgtagcgcgaggaagcaaaagaaaggtagcttcctcgcgttcaggggaacccatatacaccatgtgggtcccgcgcagatcatttctccatgcttcatgtatatctctgacacttcccggaattaacaaataattcttggaatgtatgaacttcattggatcgcacatcttgaagattaatctattaggagtgaaggctcccgagttgacacaaggccaagtactggcaatggatttactccgccatggaaagaggaaagtatgctttcttggattaagccaatttaggaaatgttacacttccgaacttggaaggacttaaagtgaactgtgagagcagagagctctagactagaaaaggaggttctagttgagaagagattctggaaaaagtggattgcgagagcagagagctctagactagaaaaggaggttctagttgaaaagagattctggaaaaagtggattgcagagagcgattgctctatcgatatttctcaacccatttctacttttcactcagaacaatgcctgagctgtgtttcccaagcatgtagctcttccaacccgccttttctagatcgatatctgcgtctccagacataaacttcatgaaaacaccatgtgttacaaccacgatatgtttcctaggttcattgttcaattgatcggatatttctgcgacacgagatctcactctcttcgcccgctcctttactgcctcatcttcaggggcataaattccctccttcaattgccagccttccggtaaatctttgacgcctagtcccggaaaagccttcactagggccggacatgtggatccagtatcacagggaagcgcacttcgttcctgcaaatctggatccaagataagggtcgcaccattttcgataccatggccagagtctaggtcgaaatagcgtttatcgaggacgtgtgggaaagcagtgagcgtggtttggatggcacgccgcagtggagaagtgaggattatgcccacctgtggagcatgaggaaacgtttgggtgagccgtgaggcttgttcaaagccaagaggtgttaggccagggtcaagttgggagaagtctttggaaacattgtgggtagattccgcgtgacggacaagatggacttccgaagtcatagctagagaacttggaattagtagtgatctgtttgcaaatcctccctttataatagttatagcaacttaatgaaacaatttctagagtatattgcgtgattcttcctcgttccttgagtggtcattattataaccataaaaagtatatccgtatctcgatgttctaggctagagatattagtaactgccggtgtaggtccgaagtctatcttaaggcccacttcattacttcgataatagcgtctcgtaaatctaaaggggttggtagttatagtagctacttaggacatgaatccatcctttctttctgcttctcctatgacagtcatttaaaagtagtgccagtacattggtctaagggttgaagctgctacgtgacataaagccacggctatttatcggctgaaaatcgggggagtctatcccgacggatccatccctctttattagtatattgaagaaaatggtagtttcacaaattgacccgtcgctttgcaccatatcacacataggctgaataacgttggctaccagaatatgctatcgtcccactactccataccagcataaccctaagatagcacccattacaatcgccacgggtggggcaacattgaaccatgcgctccccgaatatgttactgccgcaacaaccacccaccatggttccttacccagactctgtccgtcgcttctttcagaagtcaggtatccaatctcccacaaccggtatacagctgtatatactagcccaactgcagtggcattcactcctctgaggaagtcgaccacatacttcttcttccgcaacacgcgccagaagctttggattgcaacggccagcgtgattcccggaaggaagattcctaaaccgccgaggaacgcaccgaaggcggtcgggaattgcgagcgctgtagtgctagtgctcccaaaaagacagcgaagttgaagttaggaccggggaaggcttgaataatggcaaggccgatcaggaagtctctactagagacccacccgggatcgacgacataggagcgtaagaggggaatgacgacaggacctccaccaaagataacagtgccggcaaggtacatattggcgaagaggtctaggaccaatgggggtgtggtgatctggcctctggcaacaagaattgcgatgaaggacgctaactatattagtgttgacgcttagggatcttgtcagaatggggtgcgcaccgaaaaagagaaacataatcagaagtccaatccgaatccgaataatgtgctgttgtgtgtcagcttcaacggacggcattgggcttgtagtatcaactgtgctctgtggtagttcctcgactctaggatccgtccttcgcgatcgtgtcgtctcactcctttggactctattctctcccagagttgtatcatccatggctatggagttcccatttgccttatacggttcctggggacgatgatgtctgtccttccacgcgagttttgctctcaaaaattgctgatacaaccatccatcccagatgctggtgaggaaaccaccgataaccatcagcacgggaaaataccagagtgcattgtaacagagaccagcacatgcgccaaagatcacgaggatacgggacagtttatcgcgaatagctttttcggacaactgtacagccgcaagtgcaacgatacccactgtagaggcattgaggccagaaagtaaggagtaggcaggttcgggaagagtttcactcatgttttgcaccccaagtgagagggcatacatgccaactgcgccaggaagactgaaaccgttagttgaagtctacagatggcgggcattgcagcataagggtatgaattaatcacctccaaagtagaaacacaagcatggcaggaataaatcctgcgtgtaatagggctaggcaaaaaaccatcttcgtgctaccgggacccggaagaccctgacagatagcaaagagttcctgatactatgaaatttgttaggaggccctatgacatcgggacacgccaacttgaagataagggagattcatacagtctgttcatctacccatttttccttgtcgccctttccctccacgaacctgctgtgtagaatctggaagtgtactggtggtcctccgaaggctgtaaagcctagatcccatgtacgcagaaaaacgtccaacagacggctcggcaggggctttcccgatcccccattttcacttgaaacccggcttccccgtttgtgattcagacgagagagggaagagaggcctcgggaaaagggggcgaggagtggcatactgctccttaacagctgcgaagatagatcgctcaagcacaaatagtaagatagacaaggaggatgagactctcaaacgtgagcagtgctcctataaaccatcgccgtgcgttctaggtcaaatacctatgtagatacgcgggatccatgaatggaatggatgggacgtcagggagccaagatgtttaggtaagctccagcattgcactaaagtcaaaacaaacaaccaatcaaagacaggcaatgaagcacgtgctgtaccaaaatatgggtctagaaaccctattcggaaggggaatgtcactgcatggcgtttacttgacggaggcgatgccaagcaatggaaagagctttcttggtagtcatccgagttagcggagtcaaaatcaagttaaagcgtctctgaatgtggcaagttgatatgtttatcatttgtttatgcagcctggtcaccaactcttggcaagtcccacagggtaggcccctggggtggcccctgccctaacaggtataattaggaatacaaattttagaacgcgggtaaaaagagcaggcaacagaaagaagagctgattaactgggcaaaaatatggtgcgaagacacagtttgaagagaggcaggatgttggtgaacgataaaatgtaacgttatttgggaaatgacgaagcatgcatcttaacaatgcgttctacgttatcggtagaataaacaaatatagacacctagtggcaagttacaagtggttaagccaacaagtacaaggattgtttggatatgatgcctggggaatctggcataaaagtgagcatgccataggcccacaggttttttctaggtaggtgggatgaaataattcttgcaacagagttggggggtgcctgagtattaggaaattcacttggtttagagtgaagagtgttccctagctaagcatactcaataaatacctccttctttcactacgtcgactcgtcttccagtactcctccttcagttataatgatcacgagcaccggtcgcctaaccgagtagaccgagaagcatgtggctacagtgcttattcgatcaagatccggatcttgaaggccgaacatgagctatgccgttacaccacaacggtagttggcggcaaagtaccacatgaccgttgagatcgcggaatcatggtatatcttgggattgatattgtcccgtgatcttttgattcgtgagattatcatcgtggacgaatcgtagtgtttcttatgatacaactggtctgacgggggcttgattcatgggaagacccttagagttgctgaaggatcgtgccatttcttacgacagcgatggccgtatctttttgcggttcgcaagagagtcagaactcgcggaaaccgtggtgttctctaggatctgccttttcgtgtaggttcccccgaagggtctaagattataaaacctgtggtttctcctatgatagagataatcagaggacccccgccttcgggagagaatcagagttcgcggaaaccgtagtttttcttacgacaaagagaatcagacgatcttttggtttatgagacataaggggcgcgtcaaccgcctaataaattggttcattattgtgcggcccatgcatggccggtttttatagaatcacccgagccacgacgaaaaccatgacctttccgcaacctctgtacgatactccgtactacggagtccgtagtggtgttatgcacgtgacttttctgacttgtagattgattggttattgatggcgagtttgtggcatttagcctcgcttctttagacagttgggagaaaacaagccaggccacggatcctttctccatagaacgtgatactgtagccaacgatgtagaaaaatgaatctgacaaatgaatacaatcagttcgagggatacagtataaatttcccgcgtaaagctaatggatcagaggaaccaatgtatgattggggggattgggtactctggtattcctttctccaccttggagtaacatggctgacgtcacttctccttgtgacttcataagttcgtgcttggtgcagcgacctctccgctcgcatcctaggggactaaatcaactcatagaagcttctggagcattggctgccatagtcgcagctgtataggccattttcgatcatgtacaactggaagcaacccaataaggactttgttgctttagggtggggaaaggagtaactaaaagccaattatatttctgctacaatgccattatttcattggtcagttgttactcctttctccaccttggggtaactgactctccagtcgtcgaaaaaagagcggggccgcagaaaaaaatatccagcttaacacaatactttttccctcttctcgtatttggtcaggccatgccatgcagatggataccccggttgaaagggccatcaagtataatgcacaaaaccggaccagtgggtatagtacccannnnnnnnnnnnnnnnnnnnnnnnnnnnnnnnnnnnnnnnnnnnnnnnnnnnnnnnnnnnnnnnnnnnnnnnnnnnnnnnnnnnnnnnngcaaaaaccgggaccagtgggtatagtacccactggtccgtttcagtcaagaagtttgcggcgtttgatcggagagtcctggcttcctctagtcttgctggactctctaatcttgctggactctctagccttgctggtctctttagtcatgctggtctctctagtctagccggaggtctagtcttgctggactccctagtaccttgcttgaaatatcatttgtgaaaataaaaaataaaataaaaagaaggccctaaaggccagaacctaagatagctacgctatgcagttaaccgaattttccaaaggagcattcattatttactgttggccctcaaaatcagaaattccctgttataaacagacctcgacttaatgcgttcctcggacaccattaattggttggaacgaactattggaacgaactaagctccctcccttccgtgctaggcttcaaaatgggcgtggcaataaatttggtaggcacattttacgttcatcacctactgcagtgaccgtttcagagttttgctggtcatgaactcgaatacccgcagtttctggaccgcggattcctcgatcgtccctggtcgtggttttcaacgcaaattcgttgcctgctgtgaactcatcactctgccgggggccgtttcaggtattcgttgaccatgaactctaaagaccacggttctggagcgcagcactccttttcaacgcgaaaacccatgaacatgaagagagccgtgttgtacctgtttgtagtcttaagaatccctgagagccattcgtctatacctgcgactatttagtgccctgtttccttgtcttttccaacagtgactcgtctcttcatatggcttccgctcctcccacccatgtgttttttccttaaaaagaaaaataggtgatgaaaaggaatcaaaaggatgaaaagaaaggccgcggtaattatcattttgagcgacacggttcttggtgtcgcaccaacacctcgcgtttcacgttacggaacctactccagtaagtccctactctccagtaagtccttactctcattcagcttcaaagttacatatctctcgcccagagacaacctaggataatcttcatcctaggaaataccacacttttgtggtttcttaagaaattctctatcctaagatcatctgtatcctactaaataccacacttttggaaaaccgtggtctgcctcaggaaacagattgtctggagaaatgaattagcctgggataacagaaccaaaaaaaaccgtggtctatctcaggaaacggcttgtctggagaaactagttggcctgggatattgaaaagacaggaaaaccgtggtatcaaagtttggccgcgatcttgtggtttcttaagaaaatttctatcctaagatcatctgcatcctacggaataccacacttttgtgattcattgagaagttgtgtacagacgcactcgaaatcagttcactgatttgttctctttgattgcttttcaaattctatttttattgacgctaggcctaatgtagccaaagaaaggttcattgcccttttcctattcgacagtcacgggtcggctaggccagatgtaggccgaagtggatctggccaagatttaagaagaatcaaatagaaaaaaaaaaaaaaaagatgaaactgatttcgagcggacctgtatcttcagcatcctgtagcaacccggatccaccctgtaccagcagaagtgagaaacagagttagggatactaaggcgtggttaacattaccttcaatatacattacttgtggttgtgtgccgagcgggagctaaccgcgtaccgatggtggacccacatacgggagggcccgaaccccctcccacaaacaccggagaaaaccccaccagcttctcagtcgaggacttccagcctcgcgtaccgatcgagccgcttcctgagtctcgcaaaagaacacggagcgatggtgccttcacaccagtggaaagtacaggccgggttaccaccagggaagtgtggaagctcatcgacagcctgaagttaatcatccaccaccaaactgcactcatcgaatccactaagaccgagatcgaggaggtcaaacacgaccagaatgtccttcgtgaccagaatgagaagctctacgaggaaatcagagctatgcgagctcaaatcgacgcactcccaccagcacctgcgtccagaacatgggcaacagttgcggccagcagcaacgttgcccctcctcaacaaaccgactcgcggccagacagggacctgaactgcgttcgtattagtacccaacgatcatttgtggatccagcggacaataataacagcgatagaaacaccttcggccgataccttcccacagattccgctaacagccacatccgcaccgcgctgatgaacgctccaacaactcaggacgcccaggtcgccgggattggcacaaccaagacaggctacgtgattcgatttaaggacaccgagtcggccgagctggcccgcaacaacaccgaatggttgaatgaactaggaaacaatacgaaaatggtgaaaccacgattcggcatcgtcgtgcatcgcaccccaacagagcatttcaatttagagagtgcaaacacccacgccattgagaaaatcatggacgaaaacagcctcacgggacagggcttccaaatcgaggaggtagcctggctcaaaaagaaggataagatattagggaaattcgcatctcttggcatctggttcgactcagcggagggagctgaacgcatcctcaacaacagtcttttagtgggccagagatacattagtagtatggaacgccgcgagattaagaaaaagagatgcttccgataccaaagtttcggacacctagcgtggtcatgcaaagaaacaccacggtgcggacattgtgcgggccaacatgaacggcaacgatgcctaccgggcgtcagagcgaggtgcctagactgcagtggagaacatacaactagagaccgacagtgtgcgacccccgcatctttcaaaccccgtcacccccgtcaatgctagagacaaacctacaagtactacagttaaacattatgaaatcgggaccaagaatagaggccctcattaacgatcatcaaagccaaaacctagatatactcttgatccaggaaccgtccattaccacctaccgcacacacgtcaaccacagctcctagcgcctctaccgcccaacgaccgagaccgatacagcccgatttcgcagtctgatctatgtgaatcgtaatatctctacttcagcataccgacaaatcccatatgaccacccagatgtcgctgcgatcaagatctagacttctgactctcaaatactattcttctccgtttacatcccttctattcccttatatacggacagtaaggcttcagcagaacctacactcaccgcaattcaaaacacaatcacaacgactctacaagatgactaccgatcaacaagcatcgttctgggaggagacttcaatcgccaccacccaatgtggggcggcaactgtattcaatcacaatttatcgaagacgctagtgacctgatcgcgttctttcaagcaaacagtcttcacagctgcttgcctcggggaactgcaacctactggtcgcttagcgatccagggaggaactccaccactaaccaaacagtaacggatcggccagagctactagtcaaatatcacctttaccacgaaaactacagatcggaccaccgcgccacgtactccgaatggaatcttcaagcccacagcaagcgaaccccgcagacaaggaaagcttacgaacgtacggactagaacaagattggcgaagaattgatacagcgaaccggcccgtggaaagaaatcaaaactcaaccagcacttgacgaggccgtccaaaacctcacagaggccacaacggcaggtatcaataagtttacacctgacatacgcctgacaccgtactccaaacggtggtttacgccagatctgaaagtccaacaaaccaaagtcaaccaactacgtcgaagatggcaggaaaattgtagaatactcgggcgagatcatcctcactccacaactactttccaagagatacaacaaagccaacgagcgtggactcagacgattgagaaagccaaagcatcacattagaggcaatttctagacaaagccggagagggaaaactctggaaagcggccacctacatgaaaccaagggagacgtagggttgtatcccggcactaaaggtagacgaccaagagcttatcgagaacaaagacaaggcgcaggctttcctagattccttcttccctccaatggatacccccgaggccaactcaacaacaccggcaccactagggctcccatggcagcctctcaccaccccagagattgaacgatcgctccaagcagcaaaagggaccaccgcaccaggcaaagacaagttaccgatgcttatatagaagcacttataggtccacctgaaagataacattaccaggattttcaacgcatcactaagtctagggtaccacccgaaacaatggcggaacgcaaaaatcgtggtactacagaaacccgggaagccagactactcgctcccgggggcctaccgtccaatctcactcctcaacacactaggaaagcttctcgaagctgtgatagcccgaagactctcatacctcacagaaaaacataggctgctaccagacacccaatttagtagacggccaggaagaaccaccgaacaggccctgctggtactatcaaccgcaatcaaccgagcatggtacaaacacaaagtagtgactcttatctcctttgacctaaaaggagccttcaacggagttcaacaggcaagtctcaatacttacttacaagctagaggaatccccgccatagccagaaagtagatagcgagctttataagcgaccgatacgctagcataggatttaacgactaccgtaccggagtatcactgttagagaacgcgggactggcacaagggtcccccctctcccccatactcttcgcgttcttcaacaccgacttagtggaccaacccgtcacccgtcacagtggcgcctcagcatttatcgataactattttcgttagagagtgggccgctcagcagaggagaatctagcaaagattcaatccaaagacatcccccgcatcgaggcataggcgcgcaagactaggtcctacttcgcagcccagaagaccgagctcatccacctaaccagaaagaaagctaagcacctacagggtcaaatagtagtaaacggcacagcagtctcaccctctcccgtagccaagttactgggtgtgaacttcgactaggaaatacgatagaaagaacacgtgcagcaagcgattaagcgcgcaacgaaagtcactgttactctcagcgggttacgacatttgcgcccagatcaaatgcgacagctctaccaatcatacatcacgccagtgctggactacgcatcaaccgtctggcacaacccattgagggacaaaactcaccttcgacacctcaacacagtgcagagaacctcactggtccgcatcctatcggcgttcagaactgtggccacagcaaccctagaagtagaagcgcacatccttcccactcacctccgtctccgccaccgagcacaacgcaccattgcaaacctccatacgctgccgcgggaacatccgatctgggatactctctcgcgagcccaaaaacgtagaaacaatatcgggtcgtacgctcacttcccgctggcggaagcgctgaagaccatggacctccaaaggctcaacgagctagagacaatcgacccacagccactgccaccatggcacctcgaccccttcgtggagatcgaagtcggttcagactgagaagtagcaggagagcaagctgaggccgtccgctcaacatcagacattgtcgtctactcagatgcctcaggacgcgatagccatttaggggccgctgtagtagcattaaacgtagatatagagatggttgagtcctaatatatccaggttagaccgatggaccgctggtcggtatatgtagcggagctaataggtatctatcacacagtcggcactatgttcaagatagcctaccagtaactaataccggaaggtcgataaactgcgacaattctttgtgatagtaggtctaccttataagtaattaagagcgtaagaaataagttaggataacggattgtttatacaatctactaagccgcgactaaggtcaaaatagtaggtattatactgcgcctctagtaggtactaggatattgtaataatcctagtaacgatactatagactaaatagtaaagtataccgctagccctagtaagtcctatcccttccgcctactacttataagggagaagggtttaatctatagtaatattaccacttagtaggagtataaatagagaatatctagtaaaggcggttatctatagaagattaataatactctaccggtaatatatactaggaagctatatagaagtctacctaggggccgggtatacctactaatacagctatatataggctataactagctatctacctactataagaagattagttataataataatgaccgttatagctatagtatataagaaacagttacttatatacttatagactgcctaatactagtagagctacgaagaaatctaaagagagaagtaggggatatatttaatagtatattaagtctactaggaggcttaaaataaagtaagaaaggtaaactaaatactatctcgcgagctaggatagtctaggctgtactagactttactaaggcgttatactggttttgcagttatatactataggggtagcctaataatagaaatagtaactaggctataagaggccttaacgaggctctaagttcgtttttaggaagtagattactttatatatatatatagagatatatattattatagtagcctatatatcgctttttattataagaggttagggtaaataaaatatatatatatatatatataccctatacctcctatcggtagcggtagtacagtggtaagtaccctgaaggcaacctataggataataaattggtcacttgttattctatagggcttaggttcaattcctaataccagtatatcaattactactattatatctctttggagagacctataacctaggggtagtggagtaccctagcctttttataggttaaagtggagacaatcataggccttactaggtaaggctcaaagttcaccgtttaggaagtttagaacaatctcagtggataaatcatcatatatttataaaaagtagtggtagcctacatatcgcttcattgcgaggggtcagggaaataaaacacatacacacacacacacacacaccctgtacctcccaggagccggtggaccgcttcctaggagcatcaaggttatgtcctgggagccctatagctactacgagtacgccatcacgatcccaggagcctgcaatactataccaagtggacgatcctatttcgacaatggcgccagcagtacatgaacatatttagaatgtgtttaaaaaaaagtattgtattcgagtgctcgagtaattgtgaccttcattcgttttgacacaactaattgcagcctggtttgaactaatggcactctgaatgctgttctgagtctcgctaactctcgggtaaactaacttccgaatagcccatggccagtaatgtatttgctgttttgttccaccgtcgacaaatgtttgacttgtctggatcaaagccattgccctggcttgatcctgaaaatatgcagggaactgtcaagaagataacaaggctcccagggacactgcagatggctctagggatagatccccggctctaggcatgaaattgcgagccctagcagcgttctctacaaggaccgaacaaaagaatcggcaaagggagatctattttccttttgtccgttctggccccagggctcggaatggcgcggagcgctgtccttgcaagcaggttagaaaaattttctgtcagagagctggggggtgcgagactaataggaaacgcacggacctatggtccagatggaaaatgtgtttttgttaaaccaatgccattctatcaatcctacttccagagagaggacgctgtttaaactagcaccttctcaccactacctgcgccctcatattttgaactgtagtctatattgctctctcaacatatccgtttcctatattcgttgaaatcacaatgagggctctttccagacccccttcgttcaatttcagtagaggcatgaccaaggaagaatcccaatggaggcttatcattgaggccaattggtcgaataaggcgccccctgccccctgttcaactagaaacatacagctcatttaccccgctcgttctgagtttcgccgctctttccccctgtgtcggagtaacgaggaacagtctcgcgtcggcccggttccgttcacggcccgggcgatcatcagcaccacacataagtttgtcagataagctatctccatgatggacaccaaggatcgaagggaaagtagtcacttttagtacatagttcatctactggctcattgcatttcaatggctgacactaaattgccagtcactgcacagatgacgtgttccggccgctttgcaggacagctcatacttgcatttccctgctcctccccactcccggctatatcagatgtagtcatgcctcctctctcgtttatctttcataaaattcttgtgatatctttagggatcacttcatagccagcaaagttacagtaatgccaagaaatggcaaagaagaaaacgaaacagcgtaaggccaatgagctgcctgggcgacccctcaccccagatatttctcccaagattgactatcaccggccttcatcatcgtgagtgttttgatagcattcaaatgacgttgtctaacctattcactggtgctacgaatcccctttggttaccctcattattgggagcaagcgatatggcattccggctcagttccttcggagtcaccaaaagttcgcccctatatttcttggtttatcagattttatcatgtctaatgttaataaagacatcgggcataccgtggtacatttcttatacacaggtggctacaagacagtcagttcacctcttggcgaaggcacatcagatctcgctagagagtacaagaggagcgttctagtctaccatgcgtcaaggacttagggccttactaatctagaagttcttgctcagcaaaagatgcagcatttagacgaggaacttccaattcttgaaatcttacgggtcgtgaggggggtgttctcaagcctccccccaggtaaagcctggcttccaggctacattcaaggaaatttgcagcatttacttaagccaaatgatccagggcttggtttacgtgagttttacgatattattggtcaagatcatgagtttaacaatgcggtgataaaaatggttcttgagatactatctcttcgcatatgttctatgaaagatcagcacggtaattcatcttcaacaaattaagtataaggttaccaagctgaaccagtcttcttgctacgtttttagtgaaaacaccgaatggcatcatctcaaataagtctcatctttcggggcttatccatgaagagcctgagcctgtcccagaggagcctgagcctgtccccgaagagcctaagcctgtccccgaagagcctgagcctgtccccgaagagcctgagcctgtccccgaagagactgagcctgttcccgaaggcctctctattgacagtgatggtagactttggacgattccccgagtgcctgctgaggttgatgactggccgcgcgcttcttcgttgcgcggagctacgccaaatgccgaaatactccaagaatctattgatcagggccacataacgaggatttcatgctcggacttgactttgtatgaaaattgggaaagtttgtcttcaaagagaagagctaaaagggctagcaagcttaggtctcgaggccttcctgttccaagcgagactggtttcatttctatagttgcagtttgagagcagcttcaacaaggcaattaaaccgtttacttcctattcatgaattcgtaaagtgccaaaaggatgtatattgatctataggcatagaggttggatttggggaaaattgggggtttttcgctttctagtttaatggagggcgacaacgatccctagcggctcgtacctctccgacgaccctcttatatgattggttcgatgttactcctttctccactttggagaggctcggtctccccagcaagtcaggacagaccagcgagtccgggtaggcaatggatgatagagggtgataactagacctaattgagctaataaagccgtctttctcaccgaaaaagagctgttcagacggaggtctatatcgtagggatcatcgtgatggctcctaccaaagatcttagggatcaggagttcaagggaacgtttacggagtacaaccatgatatcctatgaaatgtacctttgttttgcgccttttgcatcggcgaaacggtgacgatcaacagagacgccaacgagtgccccactgaagctagtgaatattctaccaataaaatattcagtcgagggaattttgtgacaggtatatttttttttcactccagaacatatccccgaattgtcaatctacaactacgccgttctgcggaaaaggaaaattgttctgccgaagtcatgattagctgacataagccaactataccgagccgatctgagagggtcccatcagctttattccctcatccaacaaataatctcatcaaaggcattcacttatcattaagcaacccttaggaatccacccaagccaaaatgacaaaattctctccaaaaaatcttcccgatgagtcgatgcgagagatgaactttctcgactcttccttcttcaaagagcccagcaaaagccttccgacaccagcgcaagtgagggctttgtcgaaagacatccacgcgaacccacagccgcagcctgttatttttgaagagtccaaagtcttcgtcaagtttggcccctatgtcacgatcgcagaagcgcagtgcctttggatgatcaaacgaacctttggtgacgaaattccagttcccgaagtttttgggtggcgggtcgacgaggagaactatgtgttcctctatatggagcttatccaaggacagacgctgcaggatggctggaatgagctcaatagccaggacaaaagctcgctctgcgatgagttatgtcaaatagtcaaccgtctgcgccgatttgaacaagatccttccgatcagtatattggtacgccccggtcaaaatgtgaaggttattatttacatctaatcgaatgtttccaggttccctggggcaccagcaactcctggattatgtttttcaatcatacccgaaaactgggcctttcttcaccatcaaggatttcaacgactggttttcctacttaccacaatcgtggcttcctccttcgaagaaatacaacgacccctataggtgtttgttaccggacagtggggtcattaaatttactcatggcgacctccaccgagggaacatcatcatctcttccagcaaaccagctcgaatcattgctatcgtggactgggcccaagcgggatggtatccagactactgggagtactgtaaggcactctacacttgttggtacgaggacgagtggcggcgagactgggtcgacaactttctaagtccacgcttacgagaatttgaggtcttcgcagagtacacaatggcaatgggctctgtgtgaaccagttctacctggaagtgaacgctactcaccgataggagaagtaagcatacttcgcagaaattacaaaacggcaggagaacgcacgtacgtacgtattataacaactggtcgcttggatctctgttctgaaatacttaaaatagaccattgaaaaaataaatataaaaacggatccaccttgatgttagcacaccacgagtgaggagccaaggtgtgggatcctctgcggtgaaaccgaataagccgagtagtttagcgagataaaatgtattggccagctatgtccttagataatcaaagggatatgcaacaaaagaacgtatgcgccaagctgcatctaacttcgccacaggccgtcttccgtcaactgctcgtacttaaagccaactcaggatgaattcaacgtcttccggcgggctgaagaccgattccatggtttgggggatcacgtttggattgaacaatctgaatcgcttccgctgtaatgagacttttcgagactaaatggcggacaaagtccatggtccattcctgacatcgcttattggtggtctgaagcagataaacaataagcacggaaaagtaagcattagtcaaattaggggacttacatcattgacaggtgccatgaagttctgactgatcccaggagtcgggacctgagacgcagcaatctcaatgttgcctctgggagttgagtctttggtcatcgctgtgtccacggagtcaacgatattggacgaataaacttggccaatcggaaaagtctcatggtgctgttgggtcatagcaggggagtagttccgtttgaactcgaggatgtagcccgccatgggtgcaccgacggcgtggatcagagtgcctcgtttagggtctgctgccgatggaacaaaaattgcaaagtgagctcgttgagatgaactattgcgaaaagagatgaggtgaatagttctggtggccatgatgttgtgaggtcctttttctttgcttgggtggagagggaacaatataatatggacatgagatgtagtaaaaatgcccaagaaaagaacaaggtctctcctcttatatctttcgatcatagcacgtcttaggaataattaggagtcccaagcaaccctaccaggcgcttcgaaggggagctaggcatcatcttcgtttcatatgcacgaataatattcgttctgagcgttatgttgattcccgagcgctgggattcatttttttttggcgccgcagagttggggcggcaatgctggaactttgagtcgtcggctatctttagatgaaaagtgctattgcaattcttgtggttgcttcggcgtttatcttggcaagtgattgaaggtagctgatacaaaactcgttggctaatctctggctttgtccaaattgggtgcctctatctaacaccaacaccctacactaaagcgggaaagcaaactaaatgaccaccattggccaaaagaaaagatgtcccagttgagcgactctttagtttggtactgagacggtaagttatcagattggggtaaaagtttattgagtaattaccgcatctttttcaagttaccgatgttgaatcagcttgcgcaatgtacccacaaaaatctggagcgttagtgaccgtgagaatgatccacacgagagaaatggcataaaataaaaggaccactagcggaaagcgtatggcgtcaatgaagtggataagaactttgcaaataaagcgcctccatctagtggcggctatgtgactgttcctattgcgccgagatgagtcaatcaaccacctcggcatacaaccacacaattgaatgatttgcccggaattttcaagacgaagatgaattggtacatgtggagtcagaagcgtttccatcgtgggtgttacgcttagatatctatcaccaaagaccaatagttggcattcatcatcctccgatttgaaacgggcgctaaagcaatcaatgaaaaaccactataccattcaaatttataataaaatcaacaagacccctgcttatccatgcgcaccgcgcgcgtaaatttgtttgagttattcgttttctgcttacatgtttgggcttcgtgggagcggagattgcctgatttcacgacgagattgttgtcgactcggataaccgtgcgaccgaacaacgaatgaagggtcgttctttcttgatcattcattgggttcattttcagaatatcggcgtattctgttgcatatcagaaattttgaaaattgagcagatctatgcggtaaaaagcgaatgaacggccggccggagaatttaagttcgaagcgctggcaggctggaagaggggaaattccatacgggaaaatgatgatccgacaaacgtccacccgtttcatcgtacgctcacaacggagtctcctgagcttcctttccaccataggtgacattatggcgaaaggccagcctcacatgcgggcgctccaaagcgacgcagggataacagatccccgtctgtcttgttggaatgaagagctaatcgatggttgtctagcactcaggcacaaatcctgggagcatgtcgctcgaagactaagaatagctgtgtacctttgtggatcatattagaaacgccgatactatagtagctaaggatcctgtcatttatacacatgtatgtaaaaagcagaggcgaccgggtttaagtaaaaccggtagaggcgcggttcatcacgtgaatcttcgcattgttttctcttattcctaccgcttttccggcgatcatgatgcccttttggattctaaaaagcatgggtttgttgtgctatatccctattcggatgtgaccgtctaatggatagaaaattgggttagatcaactgactccttcgcactatcattctcctcggagataaaatgtcctgtactttatcgcccaaggggtgcgaattaggtaaaaaccccactttgttaggcctaaaaatccaacgtcatattccgtgccccgcggttactttttaccacgctccaatttccctgcgaaagcgaacattcgatgccaaaggtgagttaggttgcaaaaatcgtttgctcatgtgctcatctaacttatttctagtggatgatttttcaccatctacattaggtcgtccactccatcctcacgcgtcccgcgagacctgatcggcctcctgttcggcatgactcaatcaatcatggatgagttggctacctttctcaaaagtgctagctggaaaaaggacaaggacaacctaaatgtttttttttgtgatgatgatggcctagagccgttgttagtgaaggcttccagcgagttgcctgattatcttcagcggcacgggtttcaagtgtggaaggtgttggaggaaactaagttcgtggaaaaggaggggattggaaagcaaggatacatcataccagtgacgattatctccggccaccctcgtttactatctgagccttcccagcctctgcttgttcccaataccccggcagtttttcaacgcgaacctgtcctatcaccagccttgtatcttattctcgctcttccaccgacttctacataacacaatgtgcggaattataaaatttgcagtattggctgagagttcgatcaactaaggtattgagatgggtcgcagggaaacattagagggtaatccgcgggagtgacggttcgttgttgatatggaaatagttgagggtaatctgcaggtatcgaggtggatgttgctgcgaaagcttgaggaaagtctgccggtgtaatcattgctatttggttgttcgtagcgctcattgggtcggaaaattgcttgtgaaaaatgagagtttatctttgacctgagggctaggaatggtgacttacaacttgaacatttcgctccatattgaattgggcactgttttccactgccgtatttccaaaatggggtatgagtgtttcacatgatcccgatttcgttggcatgtacacgggttcaagcccatgggtgtgaacttgtgacgtcataatgtccggccgattttgcaatgatatttgtgtgagcgaaggctcataatgtaagtcgctcacatcttgcaccatttccgaattctcttgaccactaaacatggcgttacatggtgatcccacagtggaagcaacctgtgtagcaactggtgctccagattgagaagacggggtccctgaattgatatgagaaaaagtcgccaacattttacaggacataccggcgctaggctgacgaatttgggggatatccgattgtggccaagtcctataagactgtcggttttcatccacaatatgggcatttgcctctgatagctgactctccatcactcgttctaatgaggctttgatcggccccagaacctttgcagcctcgtcctctgccaaggcatgaagaccacgtgtctgagcttcttctggcaatcctttctgcctcagatggttcaacatggcaattcttctaggcctcttcggcgatttgggcagctctttggtccagctacagcgttgtcagtgaagttacttctttctccattagattgccacttacatcgactcaccaccatcttgtggaaggagatacaatacccccagccctccaaggtcattagctagcagactgtatcgctctcctaggccaacccagtgtcttacgcgacgttcaatgtcggaaagtgagtcttcacagcccgaatctcttatcagatgggctatgaacattgaagcatcatcgtattggtactgggtacctggctgtacggcattcttcaagcgaaagaacgccacatagcaaatccggaggcggattttccccagttgctgttgattttcgcataagacgacgagtttgtagaaatcggcgagcggacagggttgcagcgaagttgggacatggcaagagaaaggcgcaatttgacgagtgcttgaagaaccatcgctgctcttttcgctgcttgttggtaagtacaaggggaaaagcgattcacgcttgtcctgcaggtcttggacgatttgtggagcttggagttgttgtgaggaacgcacgatggccttcttgatagcggactgacgagaagtttgtcggatacgctggggaatgtgcttgtatatgctttttgatgctttgacgttttcctgcttagatgaggattaaagcttcagataaatgatcgaaggaaactcacaatatctctccagaactcagactcgtctagttgatgttttccctcttctgcagccttattgcaagcagaaagaagactgtttgccaataatctgctttccacgatgcccatggtggttgctgaagttggaagtgaatagttgggacgacgtaagaattagtgggtacatgtggagtggtgggaggaggaaattgctggcagccgatcgaccgatcacaagatcgtactttttgccaggggaatgctgatcttacctcagcggtttggagtactacattcacaggcttgacccgattctgaataggttttctgcgcagaaaacctattcagaatcgggtcaagccccccacttcgtctcttgtcatcaccaacctgcactcatcctccaattgtcgccatgggtacatctaggcattttgaatcacttgcatggtatttggaacacactgctcttgatatgtctcttaaaacaaagaaagcagtatgtccagaacaaaaccgcttcgcgcctatcacgatggatctagtatcttatccccaaaaccaaaagagctgaatttacttcattcgacatcaattgccattctataattcaatttcatttggcctcgatttcaagaaaaaaagatttaccaccccttactcaaatacagacggttaaatgcatgggcttaccaaacagcctccttcccttcaacatttgcaggtccgacctcaggtatgctcgactttgagaccatctgatccaactatgaagacatgtgagtctggctccagaacttccagatcagcttttcaactaggagtacatgacacgaatgaccatacctacattttggggcatacataaaaagagacaattgcttcacacttggccaaatttctatatttacctaccaccaagactccaaaactgagaatatgacatgttcaaaatttcgatatttgctttcaaagtacatgtcccgcctcttctccccaggcagctcgcgcgagacagacttattcggggggccagaccccaatcgaagaagtatgcatgaatctgcgaaaggcgccaagcctttgacggtgaaagaacaacctgctttttctgcccctccaggctctggactttttgccaaagactcaataccgattcgcttgcatgtaagtttcccttttctccgggttaataccgagctctaaccaaacaagaccgtgcgaatttggtttcctcgcaatggagttcaacttatggaagatatcaaaagaaagggcctcggagatgtggttcttgatgccatcgctcttcatgatattggcgtccagcaccaagcccgggatggccatgacaacatgaaggatgcatatttattggaccttgcggtgctggagacgggtatatcacgggtttgggggaaatatgggattccagaattcattcctttgagcagcgatgatccaatcattttgcaacaaccagtcgaagaccttgactcgaaaaaagctctttgttaccagcgtctacattcaaaatgcttacgggagtatgaaaaaaggcagcagctcgcagaagctttgggatatgtgatgcaagggaacttaagggactggtatgatggctatctccaagacattggtggccgtctgaaaaagcttggataccgttgattaaatacatataaatcccttcatgctatgcaatttctctgatcaccagataggctcaattcaggacaagcaaaaagtcgaagttcgaaggggccgtctcacgcataatgcttgagtagcgaccttggagtattctcctcacttcattgtcgtgaggctgcctcaagaaagcaatcaagccccgcgacgcttcagaagacgaagcatcaaaatgccaggtcatcagtgctagcattagaacagtactgtaactgagaccgtggcgatgcaagggaccttaagggactggtatgatggctatctccaagacattggtaaccgtctgaaagagcttggataccgttgattaaatacatataaacccattcatgctatgcaatttctctgatcaccagatagactcaattcaggacaagcaaaaagtcgaagttcgaaggggccgtctcacgcataatgcttgagtatcgaccttggagtattctcctcacttcattatcgtaaggttgtctcaagaaagcaatcaagccccacgacgcttcagaagacgaagcatcgaaatgccaggtcatcagtactagcattagaacagtactataactgagactgtgcaaaacattcccctcgaaggcgcgcaagccttcctcaagagaaatgttctcatccagatacgtttcccgagacctgctgttcctcaaagccttgcaggcgtctagcagcattctagcatcttggctggagttttcggaaggtgtccatttcaagagtaccggggaatcaattctcaaaaagatcattgcctctagagcgacttttgccggtccatacaagaattggacaggaatcggggcaggcttatgatgtgagtatatcatcgccacgggtcaaaggcacggatactcaccatgactaaatcttttttttcaatcaaaatttatgatagatagcttccttcgacagtagaaaggagtctttatatgaccacctggatgtgttaaaagaacaccagcccatgcttaaagccttccgttcctattgatgattttaccatacttatcgaaagtcaaagctgtacgtcaatttggcctcatgtcttgcctttctgctgtctccttgcgattgtttcttccaaattggatagagtctatttggagaccagaagacgagcaagaaacagaccagggcctagagccaacgatcctaaatgctgccagcccgtacaagcgaactgaacacgcggtatatgggctggaacatgaaaagtctgcatctagccccgaaaggtctctaccagtatgtctccaaaagcaaatagagactagaagagctctacgcatcggtccatctggaaatcgtcctagtgagttttctcgtgacgcgcagggcccttgatattgccttctcactcttcatccctcagaaaacagattcccaaacacctctatgcaatcagattgcaactcggacagagaaattattgagctccctcacattcctccgaacattagacttgtcaaaggcagaattattgacgtggtaacggggaacagtggttttccgaaagtccaatcacatatttgataaaaggctatccttgaagatggtgccaaatgtaagtcaaatgaccaagcctccacaagattcactctcgttttacttcattctcacgctggttgacttttgatgtttgatggcttctaggcatttacatattggccgaactgaaggaatttcggatggtttgcggcaaagttctccaggccaaaaaggttttatctgattcaagtttcatagtgctctctcgagttgccgctttccagctaagagtaaaattccccagtcgggtaaacttatgaaaacaagtggtataatccttggagcttatgtttgggaatatggagagcctggaagatacagatattgaaagccaagaaatagttcaatatcgacagaaatatctttagataacatcgaggttgggatacaattgcgtggctaaaaaaagcgtccaggaagcaccaaaaacgtatagcaatgtacaagatgaaatagctgacaaatcggtaatttttgcacataaatttctgctagctactctctggctttgctaattttatggatcccaatcccagtgagtaatatgaaggagtaaaaagcaatgaaatgcgaatgtgtcggattgattggttgtaacactgcgaaaattcatacagtgcgtctgaggtttcacacctagcctagagaaataggctcttcgtagagtaaagttcaactttttgcatgtcctttatcataaaagcaatccaacagtggccctatggttagtttgctatataaaaagctctcatcgctaccaaatgctttcaatcacatctaaagacccaaaatcaactttcattatttccctacctaaagatgaatccttcatcttcagccatttgctcgcccttcgctctccaaaacataatcaaagttcggtatagtgttatacagatgattttaatactaaactatcttttcattgcatcttcaaccctcgaggatgaagctgagcttcggcgcgtcatcacaaggggagaaaagcaatgggaggctggctttgtgcctgggagctttaatcatatgcaagtgaagggttggtggatgaaagctcgaaaccttctcacagaagcgggatgccttcgtgcgttctcagtggaggatttgaaagcccacctcggatatatgctcttcatccttggcgaagtttcacttcaatcgtcttgctccgggttcatgctatggcggcggcaaaatccttctaaaagaccgtttgggagtagagcaagtatagctctcatttgctacagcttttcgggaataaccaatatcagtgactatcaatcggtcgatccatggttatttgacatgggctttgttaatgatatgctccgccgtcttcaaaagtcacccttattcgatgacaacattcggttagacgaactcaaaattgtgctcacaaaccttgaagcgattttgtctatggaagatgagcggtcagctttgattcaacctcatcccatcgacatcaacgatactattcaaatacaagcttattttgcgacagcatttcgtgcacttgaaccaagcatactattgcaaattttgccgaaatggagaaaagtttggattcgatccagaaaaaacagcaaagacgatttgccccgcctggtcatggaaccaatgacttacggtaggaagcaggacgtctttcattttcctgatgccgctttctgacattgacagatatgagagtgcaacatattgccaacatctttcaagaagtctcatccctgaatgcattagggcaagagacaaagcaggtgaagctgttagaaagatccaagcccgatagaatgatacttggtgagatatttcaaatcagaagcatccagcaaagatgcgagaatatgcacctaggttggccgacctgtaccgacgtaacatgacatgaactaacatggtgcagccgaaccagtggtagtccatattgtccaggtctcgccgaatccgtaaggtgttcgagccaacgcgctttaagacggcgggcatttgacaggaagagaagggatatctcgagtgaggctcagtctactattgagtccccatttacccatagtacaattgagaataaaggacctttgggtcatccgtttgactcttttcatcgaaataggggacgcagagacaaaaggctttgccctctcaaacttattgattggctccaagtaattcattactttactatccatgcttcataaatccccttttggcgctaaccgccgactgatgtaaaacctgggcatggacatgtaaattccaattccgagaagacaacgcaatgtcatcgccttcatcttcgggttgatcatctggcccctgtccattgactttgccgaattaattccagctgactaattcaccgcagctgagattcagagctacctcttaggtttcaagggtgaagctgaagtggctgttgaaaaggctgccgagtgggtaaatgagacaatgagggtagaactgtgcagtagtgaaatttgagagagctgcggttggccatcggttcgaacgaggggggtcatgccttgacaacagtgcgccagagctcggctgacggactggtccgatcagctttctgccagcaggtcccgtctccagaaattctgaagcctcacatttccggcagatttagtaacccaaagcggttagcgcttatctttatactagtcagagtagcgcctttccgaatcagtttttagtaatactgcagagttcctactattattcctataatactaacttatatgccactttttaaggactatagtcttcttattagaaactacgatagtataggattagtgcttaaagctctaagagataggtatcctcgtatactctattaaagaggctcgtttacactactttatatatataatatatatcggatacctcgactttctacttatataaattatatttaaatatcctctattataattatatcttcaatttaatatataagtaagttaaatagattatcccttaagtttaaactaagggtagtatcttaagcttagaaagctatatagctttaggatataatataaataggagatttaggtaatttaataagaaataaagatttttataaagatctgtatttaattagaataatataatatataatatagcttaggttactagcttctagtcctttagtagataaaagtatacctagagatataaaaagttgaggtattttatagatatattagagttatcttctttaaatataagctatattactatcttaagtttagagagaggtagtttttattaaattagaatagtagtaaagtagaaagctaagaggaagcgatagcttaaagagtataagaaagcagagagaccgatatactaaagaaacctatataatatactattactaaagtaatactatagtaagaagagtatataaataaattactaatagtaagataatatattatattataagatatatactatttattccctttctttctatcttattctattagctatagtctaaacctatatttcctaatatagattagtagttcctatataactaaaaatagcggtagcctaatatctctcccttccctaatatctcctagttagagcttatacctactatataactagctatagaggaaaccttttagtctttaatagtagagaaaatctagaagctactagtaatatatagaattagtaactatagtaataagtctattaggtaatatatacttagtatttctaactttagtaagcccctaaactactattagaataactttctactaatatatataatctactaaataagatagtaggtaggaataatagatttactacctcttcctcctattcctataactagtctagcttctaaaataaagtatagctcttatcagttcctccctatacctaaaaaacgaagtagagtagaatatatagggctagatatactatcttataaaaagaaaaggaagaataaagttaagataaaagataagactactcttaaagtaatagtataagggataaataatactatactacctttaggaggtatactaactaattccctattaactaataaagtgaatatagtaataaacttacccttagttatagtacctttaactaacttatataactactaaggtagaaaagtactataaagtattattaaaaatatacttattaactatattaaacttaataatctacttagaagatatagatactatttaaagtaggtaattataataataaaggttaaagcgatttaaagttttataaataatattattaagttataataccctaatatagtctagttaattaagtaggagaatatattcttagtaagtaatagtatctagtcttaatttaataagactatatattaggaaattattaaaaaaggtactaagctccttaatctaaaggatttactaatatctaaaggcccttttaataaatttataatagttaagaaggttactactaagcgctttatataggaagtaggttatagacttagccttactaattaatagtagtactattttttttagaaataactattcgagatatagaatataggtattaataaaattctcttatattatataaaggaatttaactacttctataaaagctacttattagaatctagggcttctttagtagagatagtctagaactaggaagaaagatataccttctatattaaatagttagaagagtatataactaaggaaagtaagggtaattttataggaagactatagctaaactagctacttataatagatagacttagtattcctaaaaatatatagaatagtactattaacctatagttctctagtatagaggaaactatattctaattaagtagattatataagctattagctattatatttagtagattctttaatttatagttaaaggtagaaataatatagaataagtctatttttattactctttaacctaaaggtaatatctttcttatagtttacccctttattttagtctaaaaaggagatacccttaggttatttattagagtaatttagtactttttagaatatagtattatctatagtatacctagtcctaaagaaaacctttagctagactactctatagtaactagggtactaaaccttataaaggtattagttcctagaggtaactttaatatttatctttagtaagagcttattaatagatagagtaaaggatatcttatataaaaggtctcggttattactctttaggtaatttaactatttaaagaaattatttatactattctttaaaaagtataatatttcctatactaatcgctaacttatataaagtgtagttatataaaaagccgaagttcctaattcttattttttatttatatctagtatctagtttaatatattctaaaatactatttactagtattatctattattatagagtaaaggtatatatatttagcggctattatagttatactagttagtataaaaggtatctaaaatttagactactaaggatactttatattagcttagatataagacttttatatatcctaaggctaagttatactaataagttaatagatagtagggataaggaggggtatattttataagagggatagatatatattatcctagtcgatattatatagcctatctagtagtctaaataggttccgcctattaggtaagtaaatctttatatctattaagaactatctcttaaatagactagttattagatataagtactttagaactattactatagataactataataattattatccttacttttagagaatatactataaaataagtaggaaaagagaaggagaaagagattagggatatataaactaagggttataaaatgatttaactagggccctactaagttagattagatataaagaataacagctattataatatattaataaagtatatactatagttatactttaatagagtagctataacttagtagattaaatatttacttttttttttatacttataagactattctaaactatagctaactaggctaagtatagatttatattttagtctactttagaagttaacttttattataagggattagggtaactaaaatatataccttatacttctaataaagtataagagactatatactataagtatagtttaaatatataattaattaggttctttatagatactataaaaaaactatctctaataatatagcttaattcctatattataccagcctttttatagttagtattacctaaaataaacttagtttataataaagtctattagagtaagttatattagatataagtccttactattctaataataatatatttatagattatttatatttaaataagaaactctaagtagaatatatagaaatactaactacttttagcttattatatcctatattagtccctcttatttatagttaataataaagttagactattatagcttttcgctataaaattacttaaagaaagattttagaaacctctattactctatatccttaaataaactagtaagtaactaaagtaattatttatagacttaaaaataagtggtactataaaaggtaatttaggaaattagttaagctaaagtctagttaatataatataatcggcttctcttatactattatttagagtactattagtctaaattaggttactagaataataaagatatttttagggacctataataaacttatatattactttataagggttaatataaataaatactactactactactataataaacttaatagttaatatagtaatagctattaaataaatattatataattagaataaaataagtataagtaagatatataagtaaaaaatccctaatctctatttattacttactttataattactaataatagtaggataaaactctatagataagtataaggattacttttctaactaaattataaaggctatagctatcttttatctaaaaaagaggtactatttagttgcttattattataagtaataaacttctacctagagtaggtcgataacctctagggaataattaaactagttaatatttaactagctttatactctactattatataaagcttctataaactttataactaggttatctaagttaataggttataattactatcttttattagtaagatatatagaaatatagttagaatatttatatcttaagtaacctagttttagtaatttaggactatattatctcttaagaaaggaaaaggcttctaattattatctttaagattaattagattaaactctatcttatatctctactaagtatattagattaaaagctaaaagttagctactttttatataatcctctctatatttatatagattaaattatactaagtttctaagagtattttctatagatataataatatattatagactattatctaaacccttatttagagaagactctctttagtattaagactaagtaagagaagaatatatcggtaaaaactttccttcttagtattattcttagtaaggtaactaaggattctatagattttagaatctttaggtaaaatataattaggctaaaagatatttttataaatttcctttaaaagaatagctaaggttatagctaggtatatccctttagctttagggaagtttaagggtattatagggatatattactaagaaaacctagtattctctttttaaagcctttcttagataaatatatcttttaggataaataaataagtagataagttatagaaagggctagatatatatatacctttaagatcttttctataagatcctcctttaagatagtagttatcttatttagagtaaaaatctaaagatctaaaaagtttattaaactaggtaaaatatattagtatataaatatcgctaaatacctatatataacttatatcgagcttttattaagctctaattatagaatagtaaagctttcgatattttagagttagccttagcttatttataattctttatttagtatagctttcttagcttttaactcttctattttctactatattaataaaagcattattttaagacttaatctaatagtttttattttattaataatcttatctttctcttttaaattctattaaagtatactaatatctttagctaattaagaaactttactaagctctaataagtaggataacttaagattatctatctactactagagctcttatacttacttagagtatttagtaaaagattagtccttctatttaactaatatataaagtaaattaacttaactaagagcttctttttactttaccttttccctcttattagctataaatatctccttaatagtaacttactttctttcctttagattaaagatcttattttaggctttccttaactccttatttctagtaaaaacctatttatactaatagctaaattctttaattataactaatatagcttaggacttagggcttaaagctagtatattaatttacttaagaaagctctaaaggctatcgctattaaaggttaaaggtataatatactagcttatacttaaatagctttaaatactagaagaagatataataaaaagactttattaggctataagtatttataggtttactaatatataaaacgaatttttagtctaataagagggtcttctatatttataagtttctaaaagagctataaagagatactatatagctattttatagatatttagattatatctagagattgtaattaagtactatatataaataggtactttctaaatatataaagggaggtttataagccctattattataagtataatagaagtaatactagtttatatatataaaagtagggctagaatataatatattcttaaccctataggcttaatatatataagtaattatatatatatttcttatacctatatatagctatatatagcctagaatatagttaccttattagagtaagtctaattctactataagttaagatagttagaatatagagtaaagattatagtattagtataacttaggaaaaataagtttaagttctctattcttacctaaaatcttagaatagagcagaggtactagtaagtaggttaaaataatttttagttagtaagctagggatataaatagattataaaatatatagacctatactttagatagggaaggggcccttagtttactactatactttaactactactttatataccctcttaactagtaggtaaacttacagctagttattaaattataagttacttagaaatgtaagatagaaagaaaattcttagggaaaaaaaaatcaattcgtttatatcctatttaaattatataatacttaacctagacttagatcctaagtagataactatatataaattcttaggctaataaatatagttaaaagaaacctaaacggctatataaataatatgatttagatagcttacttaatcgaataagaataaggtctatagtggtaagaactaagggttaacagtaagtaaacttatagctgttaattaaataatcggttatcttaggaaaaatgcattccttttaaataaccgaaagtatttattaaatatcattaggtagatagcagtctctactctaaatcagtatatttcccctaatacctaggcaacccctaaggtctagagcaaaaaattaatttcactcaggttagagatatcctatataagtctagtaataagcctatttctactatattttctaggctttatataccttatcgatttatagtagttagtccttaaacctttacgaacacttcttatttatttatatacaggcttttctatactatacctctagaagctactttaactatactatacttaaattatatatactttaagctaactatataggctatctacttttccctattaggcctacgagtagttataaataacttatatataagaatatactgtaaactcttaagtatagagattctatagtactttagaactataagttattatactttatataccctcggggccttagtaatttctaatttatagcctaaaaatattatatataagatattaattacaaatattctggtctagtataagttgccctttagttatataactttatatatattattctagtatatctttatcgagctcctctagaccctagtctattactaatatagggaatagatagtaggaattcttaaaaggttagttatctttttattaaaggtatagttagaaatatactagttataagctaaggaatacctaaaatcccgaagtatctactaataagataaatacttagccggtttcttaaaggtatattcctatatagatatctatattatatatcttactatatttatacacttttttttattaagcttaatttataataaccttgtttttagtatatagactttttaatagattaagatcgattagaataggtaggtagtatagaagctatactaagagattccttaaagtactgctattagaaataactaaggagattagggaactaaatatatagattaagtagtttttagagattctagaaatctttaaatagctatagttttaaagaattaaaaactagtattactctctagaaaccgtggtttttagaattatagcctatatagacctaaaactatccttagtaagtttattaatatagctatatcgatatctactatactaaaaactggttaatttctctaaagtttaaggagctagttaataatattatagtaatatattaagctaaggcctagttatactagaaattcagtttagagctaaccgatatatatataaatattagaagaattagttaactataggtataaataagataactattatcttcttattactaaagaaaaataaatccttattttattatatgattttataactagtatctcttaaatttaggaaagatttaataaaacttctatacttagatttctaagctaatttatttacccttaatattttactagtatattcttactactcctagctattctttagtattttattaattattattttactattattaaaaatatataaaccctaccttccgatttattacctattaatattataactctataaacatttttttttctagtatatatattttatatataatcttaactcgtttagggagtaccagtatattcctaagaacactagtctatccctaggaatactaactctacctttaagaatactaactctatttctaggatcactaggacgtccctaggatcactagtatatccctaggaacactagtctatccctaagaatactaagtctacctttaggagtactaactctatctctaggaatataagtccatcccttagatcactactatatccctaggattacctctctattcctaagggaagttttatagataaataatcaatattaagagatataatagtcgactctagataaataatattatataaggaagtaaaaggaatatagcttccttatatttatagggaacctagttatatagtcccgcgtagattatatttctatctatcttatatatactatataatctagagagtatatactataatatatattatataggtaatctagtaataagtatataatatatatatatacccctatagtctatataggtactatttttttacctatactacctcagggtttatataagcgactagttatataactagacttaagagtctatagaatatcttagtaggcctactctctaataagtagatagctaaaaatttgccacagtaataaggtaaagataggtatacagtgatataatatcaggtattagcaatcggctaagaacaatcttataagaatagggtgaaaaattctcgctagtagatatagggggtggtagggtattagggaatatacagatattaaaataagtagagatagataagctaattaaatctaataaatactacctcccttttatactaaggtagtaatcgattaaacaaaatagtttcctcaaataagtaaaaacgttttttcgaggttattgtatataacagttattatatatctaatatacccgatttctatagtaatatttcttaaaagttatccgttttcttactctcctataataagagctcgaatactttaaatcggcctataacgctatcgataataagcagcctcttaattttctatcgctaccgtacttaattgcgtttatatatctttttttagtctaaatctagctagctgtttctttaattaaactacgatatattgagttagggagctatatttatcgctcctaggatcatgctcacagcctctaggagcttaatatcctctaggaactattatgataggtcgtggaagtgagacgctggattgttcctaggctctctaccttagatcctagagctatacccgtccgtttacaggagcgctgattacttcggggagcaattgttttactacccgcacttattacctgcgttttagatcctacttattattttgaagactcacactcctagggttatatccggccctagaatccgtagtatggctcctaggcacgcttttggtcgctcctaggagtcagactcataggtcccagaggacctacaactcctgggagtgaactggacagccttgggaactagagtgtgtcccctgggctatcgatgccagtggatcattggggtcacccgcacgttttacatttggtcctggacccttgggtaagaatcctgggatcacgaagtctccccagaattaaaaaatcattcccagaggtagggtatcagaaatagaggaatataaatctagatactaggaacaaccaggactaggaataatttatgtctttccaggaaattgcaaagaagttgttagagattgagtatatatggtagtataggtatttggttgctaaccaaacgctgtatcttcttagccagctagcgtagtggtataaccaaagcacccacaatccgttacagaaggtggcctatataggaatacctcggagagtagggactcactgtagggactaaggatcgagtggtaaagaagaaggaactcttacggatagtatctcgagtattagaccaggtagaggttgaaatagatcctaagcgatcataagatactccttttagatcctaaattggcctatatggcttatgataaaagcgtactgtagataagatacggatactagaagtggaaaaatgaaagaacatagacaaacgacaagttttaggtagcccattccaagagaaagaatggcttggaaggcagaaaataagagatttctttcgagagggcttagcttataagagaatcttcttaagaggaaatcagtcacagtaaggttagctaaagagcacagacgatatagaaagctatacgttatataaactggctcttcttcctacccctctcctagtccaaacattctaggtcttaactagtcttaagatggtctagagtcgatattatttagctagacgctatttagcgataaataattttactagcttatctagcttactgaaggagtaggttctacagtagcttttattagatattagtatatagggccttattaaagttatattagctgattagctaaggaacctaacctataaatagctataaaggaaagggagtataactacctatatttctaaaatatctacaatacacttagttagggagctatataatatatatcccttattcggctactaataagtgatagttatttaattagctaattattaagataattcataatactagaaagggtttaggtagacagcagctctataattattaattactagatttcagtagttcgaaaatctcttagtaaggtaagaataaaggatataagctagactctacgacccttatataggtagtctactccaggtcggtgattagcttctaataagaggactaattatactattttctattataataaaagtaaaatagatagtaatatatagtattaacgaagtctaggaatagtgaatacctacccttaagtaaatttcaaattatcaggggatataactgctcctcttcttaaaaatctcagatattatatacttagagatttatattctagtaatattaggaagtaatccgacttctagatatagggctaaagagtataaaagactaggtagaaccccttcccttaatatattcttagaaataaaatagtattacagctactatagggcttatttagcaggggcttggggctagatatataggcactccttaatccttttcgactatatccactagatattttatacttctttagtatacttataattagcttagagttattagaattagctctaggttatatttactataggaccgatttataattatatacttcggtagataactctttaagccttctatcttaagtcattaatattactatactagatctaattaaaactaggttttaccttttcctatattcttacttcctttatatatactaataatatatctatagtattactagtattgtagacgctcactagagcatttcgacttatactcttagcaaggtctatatatatatatagttcacttttttagacacaaagtagcacaatttagtaggggaattagctatttaggtattttatttagaggtacagtcggctgaaacagagaaatgtactttggtatactagtatcttttatacccaataactctgaaataaaaaaaataagtattttctagagcttaaatagataaaagagggtagattataccttagtcaacaagcttagataagtctatatttaatatttataaagaaattgcttacccttatacctattagaaaagaagaaggtattactaatagatttaatatccctatagatatactaaataaagtcgctaggcaatatttatatagttcggaggtaaggaagccttattagctagaagtcaaacctaagataagtaattaaaagaataggctaaatccgttaggccgactagattagctattagtaatctaaataagttaggctaaggaactgatataggaatatactaaggtattaatataactataggattctttataatatcgtttcctatatataaatctttattttaggagatctataaacctactacagagtactttaaggcctaataagatctaataatagtatctcctaacctctatagatcactatctaaattagatatatatcgagtgatatagaaccaatgttaaaagaaatctatagaattatatctagtcaggtcctaggcctagagaggagggtctgtatttagaaagctgtggccatacagcctttagtcctaggtcctgtgatctagtataattaactctagacctagtaccgacggctatagatacggatccatattagatatacgtctacagctactagtctaggtaggctttctatctattaactaacggctagtctagcttagtaaccataggggcccttaggcttctaactatagtctatataggttataagtattttaatctagatcttaattgcctccttatattatactaccggctctttattaatctatctattataattactatagagtaccgtttaactaaatctaccgcctctttacttataactagattattactgaatattataaatattatctagcgattttcgaaaataatttatccctcagagatatatactttacttactagcttatatctgagataacgctataccgaatatagctagcctataaactaaggctattaataagtctaataagagataagcttattttaggtataggccaataaagaaagaaagtatatatatctaaagggtaaactattttcaaaaatcgctgtatttatactatccttgatagctatattaaagtgggggcaaggcagattgtttctaagctctcttagatcctaaatcctactctctagtatatccctatagtagaatttaaaaatagattaccccttcgatatatatattttctctcttagtgccctaccctacttatactaaccctaatttgtttaggaaagccctactatctctttataaagtatttttagtagatcactaaggttactataactataggtcctagtactaagtagactaaagttactgaaatatcctatgccgatatatagtaagatagcaaaggttttaacgccctaataaaaggtcctataggcagtatgattcttaccaaataggagctaaattatagcgagcggtatacctattaaatagggcggtaaagattaggattataaaacttttaatatattactatcctagagttaaaaaaaaagatttaattactactctaataacccttacaattttctatactatagctatagaagactaacctagtagtactaatatagtaagtcctctacagctagataactatttagatatagacctcttaggctttaatcctatatatataagattaagtgaaaggctccttatattaatatatctatagtttaagtagaggagggtaatagcatttcaattatataggcttaataatactatagttacgaatctatttagtctctatataaaagagttatattatcgctgcctatatacacgtacttgtaacttttaaccttttatatatttagctactttctaagtcttacttatcgataactttttaagctttaaatactacttatacctatatcctattagtcgatagtctatatccagccgccactattatctatagtactctgtagctgagattttatcgattactatagagttattaagaatactcgccgttacttatattttatataataataagtagcttaaaactaaatttactaaagtggtatattaaatctttggttcttaattaggcttcttactaatctaatagaccttagataagaactatgaaattaaaggctagattataagtaaacctatagaaatattaggaaagctatactatactctgtagatcgttagacctagcgaaaatataagcgtagttattattaattctaactaagggaccggtcttataaagattatttataaggggtaggaatatacaactctctaaactaactcaaacagtaaggataaagcggttatgatttttttatagcctaggttctattatatccttataggtaatacttatataaagtatatagagggaggaaggatttaattgtaagaattaaagatttaagctactactataggtaaaggttttttctaatctacttttttttcttagggctagaacaaaaatcttattctctatatagtttacttagaatcttttaggtttagtttatggtatttatcgaagttagcttcttaataagagtaagtaactaattatatactatatagccgtataggggtttagtaacttagtctacttaatactaggaaccataattacggtaattttaataaactacctaaagtatgtctataaaggatagtaggggactttcctttatctaataaagttaagcgcgatctaaggggcgctaagaaagaaaaccttaagtatataaggggtaatctatttttaaattctactttactataattacagattctagtgtataggtagaaaattgcccttaagccatagactactttaccgcttagtaacctataataattctagctagcgactaagggatataggtggagacccctaggattcaactttatacctagcactttcttctatttaaactacctattaattaaattataagtctatatatagacgtatatactaaataataagtatatctataaattaactataaggtactattagtctatactatgctactgtttccttagttttatctaactttattactaattaagcgataattggtagtaaggataaggctcttggtttttaaatttaatattaatagtaggaagtataataatattattgtactatatccactttaattaagaagttatatcactataataaggaggagctctaagagttactaaggtctatccgaaatacagatagccttattaaggctatatagtaagcgttagatcttaagtactaataaacagctgagcggtactataagtcagagtactagaaaagactgggagataatcgttaaacctatacttaagaaccatatctatcaatttgttaataaagtacagagtaatagtactaagagtaagtatctaatattaattatagggtaggagggtaaaagggaattatcccttagtatagtatacttatctataagtaataattagttagagggattacaaattgagaaataaattatatatctagtaaaaatctgctttcgagtatagcctagggacaattttctaactaaatgccataacctataattacagtaaccttactaatctaccagaaatatattaagagaagctggtagggactttatcctactgaatcaagtttagtgtaagcagggtagggcgccgggagagaaagtatatatatctaaggggtagttatataatctattttcgaattctactatactctctagtaagtccctactctctggtatatccctactctccggtatatccctactctctggtatatccctactctctagtaagtccctactctctagtaagtccctactctccagtaagtccctactctctagtaagtccctactctctagtaagttccttgctaaatgctaaagcccaaaggacccactctagttccctagagctttacagttcgctcctaggagttataggtcccctaggaactattattctaacttctaggagcaaccaaaagtatgcctaggagccatgctatagatcctagagtcggatattatcctaggaacatgggtcttacaataagctaagcagggtctaaaacataggcaaccattatagacagtaaaatatttcctctagaagtaattaacgctcctataaatagataggtattcgcgctagagattagggacttactagagagtactaaaatatactaaaaaactagggtagggcaagataggtataataagggagctttttacttatatctgcacaaatcattatctagctaggcggtttaaagtatagcttttatataaactaagcctttaagggctaatatagttttcacttactctcaaatttattccctattaggtatagtaattataattataccgaagacttacaactttaaggttaattttaaattatttatagtcttaaagctactatagtcttagaactactaaattagtagtttaggaacctcggtagttttaaaaccatatataaataagaattaaaatctatatagtcttaaaactacagtagttctaaaacctttaactgatattaggctaataaattataatatactagcgaattgagtttaggggtaatctaatttgtaattaatatatactaggaagctgtatagaagcttagtatacctactaacgcagctatatataggctataattaactctttacctactgtaaaaacattagctatagcgataataattactttaactatagtatataagaagcagtagcctatatacttataggctgtctaactttagtagagctgtaaaggaagcttaatagggaaataggagatatatttaaagtatatcgagtctactaggatacttaaaataaggagagaaaggtaggctagatattatctcgcaggttaagacagtctaaattgtactagactcggctagagctatatagcttattcgcagccgcgtaccgtaagggcagtcgagtaataggaatagtaattaggctatagtaggtattaataaaactctgagtatattcttaggaaggtgattcttttatagtatcttataagtaagtaatataatatagagtacattttaagctactttacttacctagaattatctattgccccttattattctctatacagcttaagcgaatataattagcccccctattatattatatataatatatacccttctccccgtctaatcttaaccccttagtcctctatcgaattatatattggaattatacctatcctccctttactatcccttctatagagctaaatcctctaaatcctctacccctagtattaaccccccggtataatattactaagaccccgatacacgacttaagctatatatatacctagcctctacctagaagttcggtaaactccgattataagtttagtatattctttaaaagtaatagcggtactatggtaggtagcctaggtagatctattagagatattacagttatttcctctattctctaagaaactcttatattaagaactttctatagaattgtaagcaggttagataataataactagtaaactatatatagtatatataagtagaatatagctttagtaaatataatataaagtcactacttcttttgtcccttccccttatcctttcctctgatttataactctgtgtaactaagctctttcaacctatatataagactagataaatcatttatccctaggaattcccttaccgggtatataataaacgggtctaactaagcttctataagaataggtattatctatcccttatccttaatagagccctagtttataagccggaatttcaggcagtatattcctataaaatagatagatagattattaaagataaagaaagtagtaggctattaaagctttaatttattatagaggttcctagtactagagtaagaataattctctggtttcgagttataggataagggatagataggggcagagttagagttaggatctacgttaatatagaaaggggatataaatattttactagataggaggggtataaaaaatatatcatttgcacgagtaacactatcgcttcctatatttcgttctagttactagtattcttcgaattctggatcttataacccactagaggaatctaatactagaagtagtaagtagctaactgtaaattataggtcttttagaatatcacagttattcgataacttgaaattaaaatctaaaaggagaatttatactatcggagggaggttaataggttaatagccttaaatacctatactataggcttatacggcagtaggctactattaaatgtaaagatagtattctttctattaagattctcttctaagtaatagagtagataaaccggaatcttaatagagaagattctagaagctatataggatactgtgatttagattttgtagtcttattttctactaggtactagtgagtactatatgatttaataaggtacttagccctttcttaaaataaattaggctaggtattactgtagagctactactataacttatatatattagaattaaagtaaagtatcttagggtttaagtaaacgctaactagttatttagtagcctagtataaggagagctattagcaattaataatactacttaaagactactaaccgaataaagtaagatatttagtctagaagaaataaaaaagagtagactttacttaaaacttaggttatctatttatatagtctaaccgatatcttcgcggttatagcttaatattggactaggtattacttacctaaggtactcttataaactacagatagttagagtatagcgatacatttataaaggtaatactagagttataggttagctagtaatagaatagttattagataaaggtatataccttagattaataagcctttcttaaaaattccttattaatctaggattacctagccctaaaagtataggaattttatagcctataccggaagattgattttaaggcttatactaaaggtatagataagctattataggtattagaataagatattgtaagcataatactaggttagtattcgggtttttagatacagtaggcctatattactataggtaagttcttgatatttattctaggtaaaacgggctagtacctatatacaaattttgtacttaaatatatcactactaaaattaaaagggattaagcttaggtattagtaagtatataacttaggatatagctaactatatagagatagaagatattagctatagataaatacagcctatctagctctgtaggaaactaacttctaggtataggcgatagcagctatttatagaaagctttttttatctagatagtataagtagagacgttattttttctcccatctatatgataaaatcaatatataccggattttcttcttcccgacctctataggcagcctaattaatatagagactagggacaagtagggcagtgaactaaggaaagggccagagggataggccgagtaaagattatctatctaagagttagttaggcctatatgatttatatatacttcctaaaatcgtagttatcatatatactctttagttatttctcgaattttaaagtcgatataaactgatagcttatagataaggcgatctaaagactatctataatattaaaatttcagtaaaaagtgtatattatttagtaagcttttatattttttttcccccctagtattatcgagtatagtattaaggtatcaagtatattaaggttacaagtatatctaccttaaagtaagacttacaaagttttagtatccccctagacctaccactttaatacctactacttatagctataccgctatagacctataacctatagcgcgtcgcttatatcttatatttttacctatctaaaccccttaacccttatttttattttataggttactctttatttatttctagaatcctagtactaataaagataagaatattaatagtatatttctaaaatataaaacttcctatatcgcttattataaaatactaaactttagtagatatataacttatatccgatattatatatactatccttaatctttccacttttagcttttatcagagatatagtgaatctatataaggttttctagatatttacctagaatatcttataatattaatatcagacagcttatatcagagagtatattactttctattactatatctaacaaaattattaattttatagtttaagttatagatttcaatattactatctagaaggaacctatataagactagtcactgatttctatcagtttttaccataattaggttagtatccgacttatcatatttcgctatagataattaccccttatttctcttactattcaccttaatatcactagtatctaacacttaaatagaaataaaaagttatactttaagtatttcctattaatcgatttatttatatagttatgatctctagatacagtatttctctatctagacttatacaaccctcagatcaagtctatcgtaggaaatataacaaatttagtatatacctagatattcctataataagactaattattagattaggtctattgtaggaaacactataattttagtatacctagatattcctataataagactaatcgttagattaggtctatcgtaggaagtatcccgattttaatatatacctagatattcctacgaatagactaattattagattaggcctattgtaggaaataccacaattttagtcatctatagtctagatattaatatctaggccttttaagagaagaactctttaagggatttcgtgatctattataggaagtaaagtatcggacaattcctaactaaaggagctagtcggctagctctagctagtttatcctaggttacttaaagatcctacttaaggtttatcgatactaccacccttccttcccttttatcttaggtctagcgccaactaatctaatctagtatatattcagaatacacctaatactcgttagtataataattttgcggtctttttattcttaatctattaatttatactctcccaaaatccaggctatcttaataacttcttagtaaatatagtaaaagaagaatataccccttagtctccggtatatattagagatacagccggtttaataattaaaagagaaaggactatagataacctcttatattatacttttactaagaggggtagaacttattattttctaccctaaacgctagaaataggtaagggagagctttatagaatagcctaagttattattactacctaccttaactcgacctaattactttactattattctataatatttttctttaaatatcattagaatctaaggtactatttgtagccttttaaagtagaaaaacgatagttagggattaagattattacttagctagtttataagataatacaatagatatattctaagtaataagagataatagaagtaggaagattctcaaacgttactagtatattaaaacaacgatttacagctctcttataaagtaaaggctattatagagctatatagtactatcctccttaaaattagtttttataggagaattcgacagcttcttaagttataaattacctaccgagataatggttttcttataaagtagggaaaaggtagaatataaaggcgtttatatactctagacaaattcaaaatatacctataccaatcgatatcgcagttataataatcttaatatagataatcagaaagtctaataaatttctagaggtaactaatctagtattatagagaagttaaagtatagcggaactttccttttaagggaagggtaaagaggtaaaaaagggaagaaagggaagaaagcggagactacctatagaagtaataattagttactaagttaacggatatactactatttaattatatatagaaactgtaccggtatattactactaacctatcttaggtgattcgctaccgttcttttcctaaaataactcccttttattataaatatactaatactatctatctattctatttattttcgaactaccgtaaaccagtattatctagccttagcttcttttactatctactcttactattccttagtattatctcattcttgtagtataagctatagtaaatcattagatacctatcctaagacttatagtaagttagatcctaaagtgattcgtcttatagaaataagatctttaagtgttaatataatagcttatatactcctatcgctagttataatatcctcgaaatagttagttcgatttttactcgtttctttagatatttaattaaagaattttaaagattctttgatattattggcctcttcttagctattattttatttacctgttttattgtcctatagtagcgattctcggtaatataataattagggctatcctccttacttatagcgatattgcagtagccttagcctagaattaataagctctctctctatagaagttaaggcttataagaggattaactaaggtatattattataccctataggtaataatcctactttagaaatagttataacttaagttatcttttctagtaaagtagaccttatctactctatataagtagaaagttaatcatagatttcgaggccttactacgtgctttctctttcttcttctattatctgaatattaatagattcctctctagaggataataatactaatcttttcttaatagactatagataaatactaagattatatttagtgtcttcgataagttcgttatatttatcgataatattcttcgttattttagttaaattcctagaagagttaataagtactaagtaagaaagtaccccctcccccagcccttaatataagaaataagaagacgtatatatttatataggtaagggtaatattaattgtggatttatagcctaaaatcatagtctaaaagctaataatatcttcacctatatactacaattttgcctaatcacagatactaaatttattattagtcgaatactcggaataacttatgattaatatattaaaatcattatatactttataatatcgacctaagggtttttcaataattctactattaaggaagggagctatactaattaattcttagaggatatttagtactttattaaggtcctatagtatatctcggagatcctaaatagacttttctcgattataaaggctttaaataatactgaatagtattatacttaactagagtaccaaggaaactagtctaataaggcctaaagtaatactaataacctcagctatattatataagataaaagggagcgggggttaggttttaagagcaatagttaggtaatactaagtataggctatagatataaatagaaagagcgaggatataagtagtagttttaactgcctagttctagtaaaggtctaactgccctaaaatagctctttttagtataaattaagaaggtatatattaatagctagttattagacctactaacttatagattactctgttcctaccctataactaaaatagaaaatagatctctctagtaatagcctcttaataagttattaagaccttagtttattaactgctacctaaagtcgaatctttgccttaaatattctataaaccataagtaataggaaccaatattttgatatatctatagaggaactgcttactcctataataaggcgagaaaataaatatcgcaatatctttaaggatattgttatagagaagtatatattccaatttattagatctataaaggggtatataatgaccataagatcagttatagctaaggtatatactacccagtatctaggagatacgtctaaatctataatctagtaaattttaagggaccgtagtagaatcatagtaaagaaacaacctccttactactaataacagataaaaccttttaataggcccagtcatacagttatatagtaggtaagaaataataggtatactacctcaagattctatatctttactatagatattttgatcagaataatcttatagattaaaacgatataagggagggagggaggaagtaggtataaagaatagaggtagttattaggagagggctgacagaagagaagcggggtaaaagataatagatttataaagaatatataagaaaacatatctaagggctttattttagatagggctaaaagctctgctcctattactctagggttaaaagcccccgaaatttatcgaacggtattagtataatatctatagtaccgccgctctttatcacacttcttcttatagagcttatatatagtttatatagaaagaggttaatacctaagtagaggctatagcggagattctaaaatatatctaaaaacactcgaaattcctaactagattcgaaaagtacagctcctataggattaaggactcccgtaggactagacagatacagcttaccataaacgagccgcttttactattaatattatttagctatataacttaagaaatacgcgaaattttaaaagctcttattcagactattctaggggtcaaaactttagggttaatattagcctaaagttactatctgatttcggtttaaaggatagagatggatttgccttatcctatcctctattctttaataatacctgtggcgccgaagtcctactaatatatttttaagggatcggtttttagtttaacgaattactataaagggactatatataaagaagatctaagctaatatattaaaagctataatctctggtatcttaatttcttctaatatttactatactatatataacttatttattctaatacttaaaacgaatttataataccgctaatttaggtactaactagtttttactcttaaaaagcgaaagacaatatctaggttaaggtatagagtatcactatcgtttactcttaggtaggggtatagacgaaatattaggtacagaccgctttatcgttagcttaaagccttagctataacgatctttaaattctaataaaggctgctcttataagccttcgtcttatatagaataccctactgaaggtaagcctctataatcggtatttataaaattaaccctagttatatcccttaataactgttaaagcgatatattacttagatagcccctaacttacctagtcctctatcctagcctacaatttctactataaattattttcttattagtagagactataaattaaatagtattactaatagtataattatcgattatactagcattttcgtctaaatgaattctagcctttaaatagatatatatatactagtaagttatctcccacttttcttataacctaagaagttctgcaatatcctcctaagagactgtctttatctttatctttatcacaatttagtctattactatcttaagataattctctagcttcacagcggtattaataaggctatttttatattcctataaactatcgttagtaactctttcgggaatattacttaaactaccagagttagtagagttatcacaagatttctatattttttaaatctaattaatatagcttgataactatatatatatttcgagatatttttaggtacttaggcattcctcctctattagctaaatttctctagtatctatgattaagttatatatatttttagcgataatattcttaagctttttattaatactctctaaataagttttaagattattagttataatttcaattatttccttatagcttttaaggctatcagctataatagagaactatcggctagaaaggtatattagtataagtttaaatataactaatatatataaagtgatttatagatttatattattaagggtaataataatagttgatttataactagctaatatctatctaaaaccattaatatcttcgcctatatactttaatttagcctagtctcgaaagcttattttactagtaagagattgtatcgaatattttttaagttccttttcaaaatctctgcaggtatttctataataaaggaggggatattcgaggctaataaagtttatatcggtatttatattcaaggtttctgttagagcgctaagaactctatttagagtcttaagctcctctgttagattgtagatacgttttagataagattagtagctttaaaccatatcgaagagggcagtgctagattaaaatataaatatagctaaagctactaggccagatgctatactaataggttctactattaagtatcgcttaataataagtaggtagtgtagtactaggatagttagaaattatatacttaagatagaaaattacgggggttaagccttaactttatatttttaagtaaataataggagtgatccttatctaatcaggtctagatcataagcgcctatctcttatataataggacgaggtaaaaggcttgataccgtcgtctagctaggaggggtattatagtaggtctagaagctagctagctaataaataacgtctaggcctacttaacaaacattttgtagcactgaatttattcctcctaataataccctgaatctagaatcagcctataataatatatataattatagtattgacctcttttcaaatataattaatatagaagaaaatctaggctatagaggattgttaagaatactaggagctatataccttattcttatctccttacggcctacaattaagactatttgccgctagcagtttaaagaagagggctctgttaggataaattcctttaggcctggttgaccaaacaatttgtgcttttagctatctagtataatagtataacctaaatttctagttagcggaatatataataactacctaagaccattttagctcttaagtactagttattagcctatagaaattgctaaagattgtgataaatatatatattaaagacgaaaaaaatcgaatatcctagacctaagtactaatactcctttcttattattagtaagataaattattttctaagctaaaggtaattgcataccttagtctatattaatatctaatcctgattcttcttttatatagtaattgcgattagtaataagatagtaaatatcctctgtgtacttataaagatatattttgtatagaatatcctcgctatatatataacatttccgatcctttaagtacttttcctaaaagtattataaagtcgatttatacttactatatttttgcgttcgataataaataggaagctaggtatcgctataatattgaaaatattgccaaggttttttagccttctaaatatacttccctgccttttctagaagtaactcttcttataatattttaggaaagatagaagttgtctttattattctcccttctattatcgtttactctttattaggtttattagttagagctaaccgtttatattgtctatatagcggcctacctttaaggtaataatagtattataagattataacaactgctgtattttatctttaccacttagcttctaaggaataggaggtcggctaggttaacagcttctcgagaagattaatctactctagtaatatactatctatttatagggcgtccttcgcttccttattattaatagccgctctagagagctatcgcttaatatctatattcgcttatttatagttaaactccttttgaattttctatcttaataccctctctagctagccgaaggtattaagctttttatatacgagtttattatattacgattgtatctccttacttgggttatagatataaacgttagcctacttatctaatcggtagactgctttaagatactctagatattcccggatcgacgcctattactcggttattaggtactaaggccgccttatatcgatctacctacttatataggtaattatatgtataagagatatattagatttataaccgtttattatactttatatatctatattaatatattgaggaaggtaatattttaagaaggtataggaatctatatactttataattagattctactaggctttactaaccgtatcactattatttaatatctttctatctctatagtatatataatatataaatattgaataaagctaactgtaaatctctctaagattcctcggtcgaggactattatcatttttagagagttagagaattgattgagatttttctgtcatatatacattcgccttaccaccgtttttccgttatatcctactatttgtactatataaaaaagcctctcttttatttgtcatctaaccggcagaaaaagattgactatgcctaacgggcatatcccgacggtccctagagaatgaatcatcattttcttccccagagcttcaatagtcataatttacgtagcattagaagattagttattctgctctacaactgcggccgcccataacccccgtactattcgatctataaagaactagcatataacacaaagtagttttggtaggggtgcgtaaatagtatttctcttgatgtattataacatattaggtaccggcactgatcatattcgtcatcatattccaatgttcatgcctctcattgcccagaaagtctatccggtattatggccaaaagcgacctgaaacctaaccaattatcgcctcagactaagcagggtgagcgacgaaaacaagttctcattcgcagtcatggtgcgggtgccgggggagggacttctggctttttttccactttaggaccccctttgccccctcggcgattggtgccacctaacatccacatcgcgaaactcccggggacatctggtcctctggccttggcttttttaggagctagagaaaaggtaagcgcgtgtctttgggagtgcttgagagtgacattcttaccatctgctttcttcttcggctccgcaggcggatcaggaggttttacaggggccggttccggtgcagggggaggagggtcttcctttggcttttcgggaattggccacatgtgcatagtgatagcccagtcaggctcgaccacagtttcccaaacctgtgggaggataatgtcgccattcgggccaataaggtcataatgaccctcggcgacatgaggtccaatgacttcaatatggaggaaagcctgccggatgagttcttccatcccctataactaaaattaggacgagagaactatatgaccggagtgaggggttgacatacctgccaggtagcacatagttcaaatggaaaactgaattttctcccaacagcatccttgaatttgataggctgcttcttctctgggggtggtggtggcggcggtggtgggggcggttcggcagccttagcagctgcctcagcagcttctgcggccgctttggcagctgcttcattagctgcggccgttgctgctgctgctgcctcggcagcggccgcggcggtggctttctctgctgcctccttggccttcgcggcatcctccgccgcctttttttcggcatccgctcgtgcaagcgccgcagcttcctgggtaatcttccgatcatgcgcagtctgcgcatcctgggctgctttctcggcggccgcgcgttcaatagcctgctgtttggcaagctctttcgcttcacgatctagacggtcgtccaaaatcaacttctctagcctcgcaatttgctcatccttggcagtgtcaaccggtggaggcggtggtggagggggagcaggttcaggggctggagccggagccggagccggagccggggctggggctggagccggagcaggttcgggagcaggcgttgcagggggcggagatttaggtttgggttgcactggaggagaaggcactgggggatagggtggccaataatgagaaggcatcatgcccgggatcggtcctccgaaatagctgggttgatctcgatagaaaccagtctgaccgtaggccattaactcgtggggatatccagggtaaggggaatggataccgtggggacccatcgcgtgcggcattggcggcattggcggcattggattgtgcaattgaggcggctggcgaggcgcatgtcgtggatgaagttgcggttgatcgggaagaaaatgaggcccaggttgaaagtggggtgggtatccgtaaggcggaggagcaccataggggttaggttggcccgggtgaggaattctcatgagttccgatgtgatcggaggaggattgtggtgggcatacgggccatggcccgggggtgggggaggagggtagggagtataagatggaccagaggactggctaggggcatatccaggggcgggtggcataggttgctgccaccccctccgatcatttcgaccaaaattgagagggtactcatcggcggaatcggcactatcgggagaatctggtgattgttgtcttcggcctcgaggggcgaacgactggtgttcctgaaccatacgtcgcgatgttgggcgacggcccgaagcggagcgtgaaccgtggggcggacgactgcggtgcgaagttcttggtcgggaggctgaatcagatggtttcaattcatccggatatggcaaatgcgcccactcatcataatcctggtactcatgactttctaactcggaagatgtagggacatggacaccagacgagccctcgtcgtcggaataagagcgatccgagccgtggggatctggatcaatcgagatactgagcctgtagagaaaagagttaagggtgagaaagtgagtttcttaaagaagggggagggggatataggaaaacaaaacccaaacatacgtcatagagacaatgagaagcctttcagaggtttaaaaaatgtatatatcaaggacaaggacttgtcctcccactttctcgcatgcgcgaagtgaggagggaatacccaagtagggtttgaccagacgtgtaaagttgagggagaaaggaagaaaaaaaatgtcaggtgaaaatgatcgcgggggatttgcgcatggacgaattatctctctttgctttttctgtcttttgtcccttttttctcttcttttgatcggatctctttgaatagagtagaatagaaagaacagaagaaatataaaacaaaaacaaacaccctttttaaacgggatagggggtataagaaggacagcgtaggagtatatggagtacaaagtatgtaggacaacaagttcaggggtacagatatctatcaaagaaaagaaacagaacagaacgaagaagcccttttttagttctcgaatctgatatttcatcaagcccattgggcattttcttttgtgtgtttcttaaaccatctttttctcgtttcaatctgctgcccaaacggaaatgcccaatatctctatactccgatccactccccgtacaatgccccataccttactccatacatatgtacaacaatcgaacactctagatttcaacagatctgttttattagggtatgctcgaatcagaaggcttagttttgagccgcctgaataattacttcactggcgattcagtagttctttggctgcaatcagctcgcttcgactcgatgcccaatattggtcatcgatcgaccgtgactcaacaatctcgcctaactttaggagcgcaaaggccttcaatcgttctagggtcttcttgggaaattgacctgatacgccagcgtaatcattgtcaagcatccgagttgaggcctacgggggaaacccgggttagaatggaatgagccaataccattatttgccgacttaccaaagttaacccatagaatcctcgcaggtagtcgtcacaaagctcaatgcttcgactgaaatgttgcaccgacctcccaaggagccgggatgcgtccccatcggaggcgcatatgtatagcagttcaccgaggcgggaatggatcttacattttaatgttagcgaccatttgatttgaaaaagaaaagaaaagaaaagaaaaagaaaaaaaggtgcctgcatgcatacattccaagagttaggagcaatgagtaaagcctcttcgaggctaaaaatggcttgggaagccaacccttgtgactgatacaagtcggccagttcacaccaggcttcagcatcagtagggatggcatcgaggagctgaataagaccggagattgcatcagatggtcggttgagcgagcgtaataacgccacccgccgcttcaggatgggctgtgtgtatggttagtcttgcatagcccatgactaccccaggacctgtaaccaatactgaccacattcaccggactctgtgacagggtattgtcgtattcctgcaggcatttctctagcgctgactgatccttggcggttgcctcctcgtacagacctcgaagccccatgatcctttcattagatggtccaaaccggagactgaggcgattcaggcaggtatgtgctgactgatcatctcccgtccgaagacaggctaatagaagctgttctaatcgtgcatagtaatctgcagtttctgaagatttagatgaggtaactccagacccggatacctggcccaggatcgctggtgcttgttgagcaagatgaagagcagagatcagatccgatccgttcatctcacggatatcagcgacgggaccagccataatagactgtcaaaaaaagacaacacagcttcaaatgaccttgagaaaaatggtgctaagccgagagagcaggggtgctcctattaggacagatgttaagagaacagagtgcaccagagcttaactggccagagtcccgtgatccggtctcttatcggggatccccccaaacgccaacttctccaccccgcggagcttgggttgctttacactcaacatctttcatttttgttctgaactatggctgatctgacagcccaatttacaatgcacctccagtcttactaggggaattcgttattattcttcccttgactcgaccttgtgaccattgatagctcgacacgatgtgggcacccccatgtttctgccctagattggccaccactaattccagtaccctaggtttgaaaaatcgctttatgaccttataaaaggtctccggggtcacaaaggaggcgaaaatgaatacatccagagttcattgcgtgaatgcaaggccgagatcaaaacacaagacatgggtactaactacctatttacccggcaatggatttgatgctgatgtcgagtagacaaaaaagctacagccctattgaagctcatctatcttgaaatgtttgggtatgacatgtcatgggcatcttttcacgtcctcgaagtcatgtcatccgccaaatacctccagaaaagagtcgggtatctcggagcagtacagagcttccgaccagatactgaagttctgatgctggcaactaacttgctgaagaaggtttgtaccctgcatagcttcaaattccccttagtcgctaatgctcttgacaggatattgtcacctccagtattcccaacatgtcactccctttggtcactttgccgcacattatcacaccttccctagcaatgtccttgcttcctgatttactctcccggctttcgcactcaagccctgtggtgcgtaagaagacgattgtctgtctctataggcttgctttggtgtatcctgaagctctgaagttggcatggcccaagataaaagaccatttgatggacgaccaagaggatggaagtgttactactgcagcgatcaacgtcgtttgtgagcttggttggcgacgacctcatgacttcctccctctggcacctcgattctttgagcttctggttgatagcggcaataattggatggctatcaaaatcatcaaacttgttagtcccctatgcccccaaccctatggaatgactttcttctgagcaccctctgacttctgctagtttgcaacattaaccccgctagagccaaggctgactcgcaaactcctgcgtccattgacgaatatcattcaaaccacatctgcaatgtctttgctctatgaatgtataaatggtatcattcaagggggaattttggacggagaagagaatctccaggaaagggacgaagttgccactctttgtgttggtaaattgcggggtatgatagttatggatagtgaccctaatcgtgagtatccttttatcgcatttcaaatatatgatcactgaccatcgaggcagtcaaatatgtcgcacttcttgcgctgaaccgcattgttgctacgcatccaacgttggtttccatgcagcaggatgtcattatggattgtctggatgatgcggacgtctctattcgattgcaggctttggagcttgccgttggaatggtcaacagtgattctctccagcaagtcgtgaaccgtctactagatcagctgcaacaaacctctgtgcctgcagctgaattggttgatacgcccgaaagcccgaaagccccgaccttatggcccaacgactaccagactgaggttgttcaccggatcttggatctttgttctcaaaagaactactctgaaattgttgattttgagtggtatgtcgctgtgttagtacagctagtcggacttctcccaccgtcggagagtgaagacgattggagtcatccgaaagagcaagaggctataccaaattcgaggatgaacgttgcgcttcgaatagggacagagcttcgcaatgttgccgtaagggtaaagggtgtccgtatggaggccacaagggcagctgagtctctcatgtttatcgacaacagatcaacttttttctccttcggttcaaccatcggcgatggtgtcttaggccccgtcgcctgggttgtcggtgaatatgctgaatatctactgtcgcctaatcggacactactgtcgttgatcgacgtctctaatgcatccctcgcccccagaactctttccctctttttgcaagccattccaaaggtgtttgttcagattagccagaccagtgaaccaggagatctttggagaagtgagatgtcgctattacttgctcgagtcgttgacttcctcgagggtttggcagcccatcctgatctggatgtgcaagagcgagccatcgagttcctagaagtcctccgcctagcagctgaggcattgacttccgatacacaaaaaataccatttcttctcgcttccgtcataccaaacctattcacagggctcgaactcaaccctgttgcgaccactgcgcagaggaaggtcgtcttaccagatagccttcgcctagaggaacctttcagtcacgatctgccaggactttttcgcaacctggacagcccatcatcgcacgggtcaaagccttgggaaataacagacttctatcatcttcctgaactctcgtatccgaacaagcagactcgtgacctcgcaccggttgatttgcagccccatgcgtcatatcaaaactttaccggtcctccggtggaatcctctactacagtacaaagaagaatgcttgagcgtagagaacgcttcaaggatgaccccttctatatcgctccttccggagaatcatctggcacatctacgccattccacgaagctctgagcacatccaatggcgaggtcttggacattgattccatccccatagttaacttgaagttgggagatgaacaggtcagccatgctgatctcgatcgccaaagaagtcgtcgaccacccgtgaacaaattggtagttgctggcgatgagacctttgaaactccgaactctttgacagaaacccccaggactaagggtgcgggtgatgaccatcctatgtataagcgctctctgctccaagttgactcgagcagcctagggaatttgtccttggaaaaaggcccatccccccaagtttccgcagatgaaggggacacagaaatggcccgagcattgcgacaagtggaggaagtacgattgcagatgcagcgagcatcggagcgaatccaattagagggcactccggcagaaggaaccctagtcaagaagaagaagaagaagacaaaaaagtacgttacttcagaccgagataccggcacggtggttgaagaccctacggaacctgcgacagggaagaagaagagaaagaagaagaccaaggaatccgaaaagctaccaggcgaaaattgaatatcttccaggccggcggagtgaatcttgcaacacgtgtggtatttggctcaagcagcaacagtgagatacaatcaaataatacatatttcaaaagaaaaaaaaaggctctctgacatgcgaaccatcttgattttgacattcatttgttcccaaatccatcccttgttcgtggtccattgacccctcgacgtgagtgtggagtatgagggatggtcggtcatgctgactcgagacatatcggaaggctataagctagggtattggcacagtaggtaaatcgtcgcttgaagtccattttatcctgtgatccgtgtgaaccatgaaaccacagtggaccagaggtcagggacaatccgtaggagctctagaagaagaccgccgcaaacaacaaaagcgagtagcactagagactcttcagcacggcttcaatttaacagtggagttcagacacataccaacccagcttgctgaaaggggcgactttgtgttcttcttcggtttaattgtggttggcgcctttcccctctttgcggcttcggtcttcgcgaagcggtcatttgctcgacgttgctgtggtgtttgtgcctggtgtgtgttaatcatcatacacaacaaacctatagcctctggaccttaccatgatggtttgcgtatgagagagatttgagggagacagatggatggggaagggataattcaagacgtgaatgtgccggcaaaaaaaggccacgttgttttttggggagacacgttactatatacactttggccccctgaaattaagtggtttcaatctccagactaattgcgcgatggacgagtagttttcaaaatagattcaacattatgccttcgttgtcctgatattcttataaaaagaacaagaagctatagacaaagataggtatagggaaaaagcttggtttgagatggtgtagtctctgccacaaattacgtacattactgtaatctgtcaaatggagaatcctgttctttcactgtctagagagaataaatatacatcgatgtccaatatatacgattatactagtatggatatacgacatggagtatacggggaatcagacattccaaaggcggtgtaaacagtcggagaacaaggcggtcagggatgacatcagtggacttagtcatcttagtcaggctcagacatcgacctcggtaactacgattggaagacatagttatgtaccctagttaggtaatctaaaaccagcccgggcacaaagtaatcttattattcacttgaaagtctggtattgtaatatcgctacactaaatattcagaatctaagattgattattgtctatacatcaatgggccgtttatcattgaagaagcggcttccacccgatctgctcactggccgagtcactgagaagatcggtagagcccgtatcagcagtcacaccactccctggactatcctgcgatgatgtgtgttgactagaaggcgatactgccccgaccttcgtctgagaacttagtgatagcggtttacgaggaacagccggtcgaactttcgccttttcaactgcatggggcgataaagaccccgtgggggactcgaaagtatcgcgtcgcggaggtagcatgggcttctccctcgtatcttgaaccgggtcggtgtttctgttctttagggagcctagacttggtacccaatcgacatccgcagaaaatggattggattttcgttgaggatttggaatatacccttgcttcggtggttgtactgttgcctttacggatgcgcctgtcatgcgttaggaacacccgccatatccgcagaccaagacactcaccattgtctagccaccaccggcttctgtcagagcttgccggtggcagccccggtgcgatagaaacatgtgttgtcatttcgtcgtcgtccaagtccagaagagagacagagtctgcgaaagaattgtgaccgtggccctgtttctcctcgtatatcgattgtctgaggctttctttcagtgcatggtcgacgatatcaatgacacaatcaaaagttgcccagacgggacgatggtcagacactttcaaatccgcagtttggtagttcgtttgccgcagattgcttcctctccataaaattcggtcacaccatgcagggattcgtgatttttcactgccatatgttagttgcctcttggttagattcacagtgtacttacgacgtatcatagatgtctcccccaacgtcgtacttataagtcggcggaaactcgattgggccttctgaatagaattgaaacaccctgcccgctaccatctgtagattcaactattgttgttagcccaacgtcgggtgtcaaagggttatttgccttacttgatcattgtcgtatagcctttggtagtctcgctgtaagatgagctctcttacgcttgggttacccaacccaattcgatagttgaaatcacctaaccagatcactgcgtcatgatcagcgattgaccggttcttttgaaacctcagcgctcggtcgatgatctcatagtctctatttctttcatcgtagtttgcaaacccggcagcaagatgagcggtaacgaagcaaatactcgtgttggagaagtcgaagcgaacagcacagccgcccttgttaccagcaatcccagaaaggccggtctgtgaataccagttagttggaatagccccttggaaaatgtagaatgacttgccttcttcacactgccttcaacattcttgatatacttcagcgaactctcttttacgtagagcagaacagcagcgccgactagctggccacttctcaggtgcacgtattttccagtccctttcatcttcgaatgggtgtttaaacaatcgtggaccgctctttcccagaccttgcgggtgctgggatcggtggacataatttgctgagggctcagggcgacgatttcctggaatccgacaacaaatattgttggatcttcgtcggactcatccgactccgggaaaagccacggagtgagatcagtacctgggccttcattacgtccattcacattgaaagtgccaacccagaaccgaacttgttttcgcgaagaatattctggagttcggtggttcaactcctctataaccaaatcattgattggatcgtagaggtatacagggagttgatttgtgagcctccctaaaagaagatcaatcgtcctctgtctagccttgtccgtgaaattgttgacataaagtcgagtagcactcttccgcgcatctgcaagtgcccccgcaagtgacatctttccgtgtcgggtgaaagaggatttgagggcgccggtcccggcataaatcttcgaaagagcatcaccattgtccgcccagatggtggaatgccgaacctgcatgtccgaactgagcctgccgccttgctgcgataaaaaatactccaatgccatcaaactgatgatagtctggacgaggtttgttctatccaggcagtccaggcaattggtccgaaacacaccctcttgctgtaaaatgaccgaagagttgttcactgcatcatctctgtcgtagggggttttgttgggacgatgtgaatcttccgacaaaaaataggaaaactcatctaatgagttgacaagctcatgtttgatctgggagctagcctcatatcccgaaggacctcgggtctcagcaagaaaatcatattcggtaagtcgcaaaagactccgatgtggggacgtcccgtcaccttctttctgtcgcgttgagctcttgctgatgtgctttcgaaacttcgacgacaactctgcttctccaggcttcagctcacttagcagatttaccacatgtactgcgccatattccaactccagagcttcaaagtgtttgttaaatgcgtgctgcgttgcgtcgctcgaccgcgtgacctcaatcttttgctgccccggaatgagccctggggcttgttcccagaaaataggtaccgagcctcggacttgggcatatgaaaatgcaatgcccggtgaaacccatagaatggtttcggtttgcacgaaattggcgacattcccatcatcgtcaatgcctctcgagttaaacctcgtaccagcacggcgagaagcttgccgggatatgattgtcaacatcgaagggaagtttgtccgcacatgaggaaggattgaaaccgtcgctggcactttgagtgtactggcaaatccacggataacacaggttaacatctgcgatgcatctaatttggccttatctgatggtggcaagtggctccgaaacaagagaagcggactgatcatgtaagagttccacagcatatcttcatctagagtatcgatgtcgaatgccacgggtttgttggcccttgcagtattgttagttgaaaaagatcggccagtgaagaacaaggagcggatagcttaccggtcttggaggcgatccgtaaggttaaaatcgagactgtaatagaaactcccatctccaaggagcttcttcaacgccaggaacggatggtcagttaccacatctttcccgtccgtgccgagtccctcctcggcggcgaattgagacccggtctcatggtccaaaccgtactcgtattctgaacgattgagacaatcttatattgttagcaattagtcggccagaaaggtgcataggaaacatacagaagcctacattgtcaattcttgacacggtttctccgggtctcacggtggcagcttgcgaggagccggtgacgacgcagacaaacacatcttcgttgagagtaacaaggccgagagtaccatatccatatcccaacggcctgtagccttccaggtccacttcctctaagtccgagaactcgacttgacagcgtgggctgtccttcgcactggtatcggttgatgtgtagtggaacactagggcatgttcggaagagaccagcgcaattgtacgttgaggttgatctcgacagagaacccggagattcgacatggcgcgagagaaatcagagtgtggggagaagcagtggcattgcttacttccacaccaataagtcttatcctatttcggcgatttctatgtcctagaaaaggaccacttcaccacaagagcccgaacaaagcgaagaaatagcttcgattctcaatattattaaagaagtcctcaataataataatataagaattattgtcgagctgaggtggagttgtcaagagctctcccggtctattctccccgcgacgtcgggagccctggaacaccggccttatcggttgcttactcatcccgcgtctctccacttttttttctttttcttttttcgattcttcgtcgatctccaacaaacacatttctctgattgattcgatatcgtcgtcatgggcttagcagggccgaggaagtatgcgacccaactcatcctttcacgcatgattttctaacgcccgagtaggagtaccaagatcggcaatgatcccaataacaccaactggacccggtccacaaccggattcggacatcggatcatgagctctcaaggctggactcctggaagtcttttgggagcaaaggacgccacgcacgccgatttgttgaccgccgccagtgcttcccatatcaaagttaccctcaaggacgataatctcggattgggtgctcgtattggacgagagagtgagccgactggacttgatgccttcaaaggattgcttggtcgtctcaatggcaagagcgaagtagaactaaagaaagatgaacaaaaacgtgatgacgttcgattggctcgatatgctgccctgaaatttccggaagtcaggttcgtccgcggtggactgttagcacaggagaaggaaatcgagattcctcggccgacccctaaggatgaaacagccaagagatcgaaatcggacaagaaagaacgcacaaagaccaaggacgacggaacctcttcaagcgaatctgatgccccagcccgcaaatccaagtccaaatccaaatccaagaaatcgcgctctcgagacgaaacagatggcaacgaatcaagctcggaatcaaagaagaaaaagaagtcgaagaagaggaaggcagattccgagcagagtgaatctacagacaaggcatctgaagcggaagtcaaggtagctgcaccaatttctagggagcggcggcctatgggacgaaatgtcactcgttcacgccatatcgcccagaagaagagagctatcatggacgagaagtctctgaacgaggtaagctgtgcagcaactattttccattatatctttgctgaccttaaccagatcttcatgatcaaagcatagagtttatgcaagtctgcatctgaagcgcattggatataaaacttggagttatttggtgttttcactttctaagatttcccgtcttgaactagatatatcctgttataaatcaaaataatttcaatctcaactattgttatatcatgtactccgtatataccagctacccgtaagcgaccactcagggtggtgacgcatacgggttatagtttgctgggcgtagacgaagcaaagtctattgtagggagttatagttttgccgagatatagattacctaagctaacccgttccccgggccgggtgccttgcagtatccacattcaacgtcatatcaaacctcagcgtgtttgtccctaatcgcggattgctcggcattgagggtgcacagtcccgactcacgccttaggagaatttgtacaggtcacttgcatcgaatccccgacggagaatcgttccgcgatctaccacaactcccataatctctggcaatctacatgaacttttagcacctctcgccctgccacgacccgagcggagactgggagctgtgcagaaactgtgccaccacagagggttgtccctcctcccattcaacaatgaacggggagacgttgtcagctggacaggcctcggcgtccacatctcagtcgagtcgcggaagaaaacagtaagacaggtccaacacctcttgaatatatccgtaactgactcatatagcatccactgggcacctttgaatattggtcttgagagacgcctacaaacattcgtcgtgctatgccacactttgactatcgctatcttcctgactatcttcttttttacatgcgccatcccgttgttctggccacttttggtcccatatctcgtttacatatctcttttctctaccgctgctacatcgggcaatctcaagggacgtagcccattcatgcgctcacttcctatctggaaactgtatgcatcttacttccctgctcgtcttcaccgcgaggagtcacttccgtctacaaagaagtatatctttggataccatccacatggtattatctcccatggtgcgttcgccgcatttgggacggaagctttgggcttctccaaacttttcccagggatcaccaacactctgctgacgctggacgcgaacttccgtattcctttctaccgagaatacgcacttgccatgggacttgccagtgtttcccgggaatcctgtgagaatattctcactaaaggaggtgcagacggagaaggcatgggacgagcaatcacgattgtcgtgggaggtgcccgggaatctctcaatgcccagcctaattccttacgtcttgtgctgaagcgacgaaaagggttcgtcaagctcgctattcgaacgggagctgatctggtgcctgtcttggcctttggtgaaaacaacctctatgatcaagtagactcggatcagcacccgatcattcacaagcttcagatgcttgtaaaacagactttaggattcaccattcccctgtttcatgcacgtggggttttcaattacgacgtcggactgatgccctatcgaactcccctaaatatcgtcgtcggacgaccaattccggtcatgcagcagcagaaccgcgacaagatcaacgatctatacattgatgaacttcattctcgatatgtgaaggagctggagcgcttgtgggatcaatggaaggatgtctatgccaaagacagagaaggcgaattagagattatctcatgatactacatctttatgtacgggttgaccggtctactatgacaacatgtgaaccctatggggcatattatacagcaatactcatagagaaataagccagaaatgaatccgtacactcgatctccaatgtagttcggattaaataacacgcgcgaaaaagtaaacctatgaattgggtatcagatcagacaaaatcagagcttgcgcaaaagcataaaaaaatagataaaaaagaagagaaaaaaaaaaaaaaaacacatcgaggctttcatcctcggaatggcgagctgaggttcggatcgcatgaggtagcagttgggtttagacctggcacttccgctgatgaggatactcgtcggctttcactagcaatgctcctgttcttagcactgtgcccactttctgctcgaacctgaatcatttcctccagcatgcgtgagacctcgtccatattcttccccgggtcctccttttcactcctatcagacaagggacgcttgcctggactcgcagacagtgcaccgaagccattggtccctgcaaaattgtctacatctcctgtagtagagccattcttgctcttcaactctggtgactgcgagtcattagtcacagcagccaagtctcgatgcctagctgcggaccgaagcgcagcaagcatacgatccttatcatcgagctgcaaccgaagctcattgatctccatgtctttctcacgaaccacagcggagacatctggatgctcggcaattgtagcatttacaggcttaatgccccctgacattcgggaatgactggaccgtcttgcctgaagcagccggcgctctagggtagagatgtaacggttcttatcaccgagatcagcctgcagcgcagtgatctgtcgttgcaagctggctttgccatcaccaaattcaccaaggtcgtactcgtcctcgttgccaaacgaacctcccgtgtatatcatagccgacgacggatcgttgctattgacagacatgaacgagatgggccgaatcgatgaatgaccggcacccagtgtagattggctggcggacgaacgtagtgaacgtgaacccgaatccgttgcagacatgcgagaaaaacgcccaaacgcagagaggctattatggttgttgacaccggtggacttggagctcaaaatcaggcgattgagatgttcgatccgctctttgagcgcagtccgagccaactgcatttccaacacctgttcctcgtgtcggacctgtgcttccttttcatattgttgttcgtcccatttgagttccttctccgcttgggatttggcctgagtatcaagctgaccacgaagagcctggatctccatacggtaccgttcaagtagtacccgacttccggaatcaccgccaccgccgccgtatgcctcctcggcctttttagcatgactgacaatattattcttcgctcgcgcagcgaatttcatggtattcagagtttcaccggtatgcgaattgatcgcactcgaaaactgaatggtgcagagaatactcacaagcgaaccaccggacaaggctggttgtaggagtctggtcaacttgctatcccggtaaggcaaatgcctcccgtcacggtccatggggttgccttgcttatccttattttccgagagccgagagatgatggttcccagagtgagcagacttttgttaatatgagaaccttctgtgcgacgttctttatcatcggccgcacgctcagagccagccagatcaatcagactcaaggtcgacactcgcacaccacccgggggaatcccggcgcgcttatcttgagagctgccggatggcactcgctctcgactctcgaccacgatctgaaccaccgcgtgacttcgagaactgcgcgcattgaactgtgtgctgctcgttcgtcgtgcatggtcaccccgggcgataacacggaggagttgtgtcgggctctggacaatctcttccttgagcggcgttgcatatactcctcgtttgctgtcctctctcagtttgatttcctcctgctgggttcctgcgggggcgttggcagcggaagcggaaaggaggtcgttaatcttctcgttgtagatttctagatagctgacccgcagtaagaattcccgatgtggggtctctctgatgaaggaaaagatgtcggtgattgcgagcgggattacaccgggcgaagtggctgttccctgcatagagaaggtctttccggttcccgtcataccatatgcaaacaccgttccgtgatagccctccataacgcgccggaccagacgtttggcagccgaatcataaaccttggcgttgttttcttgtggattaaagacattatctgttcaacgtttagttacgaggggtgggcaagtgagttaaggagtatcattctcaccataaaagtaatcgcctccttctttcccacggtatgagatgaggctttgccggctatcgacggaccattcgccatgattgcggggagtttcccctccgctgttgttgtctggacgaacgcgcacgctgaccagcacattgcctttgaactcctttggcttagagcttgattttcccatcgcatcatctgcatcttcaaaggttgtcgcactcgttgagcaagatccttgggcagaagaacttctgctgtgggttggagacgcctcttgatctcgcgcgtccccacttgatatgtatttcccctcgccactgccgttgagtaatgatagggttttggagctccgataactgctcgtagtgcctgtgctcagtcgcgagcttctttggggtcgcccgttggaagtagcaccttggattccagagatcgatgatgcagtggatggacgactgctggcctttggtggttgcgggaacgaggcgatactaattgttcgtcgcaaagatttgtcggggctaccaggagtgcgcccaccggaagctgaccgagccgcgtttaggttggaggttgagtttgaacttgatagaggtgacttgagcgatggtttggggctcgatggggtccgcaatttggaggtctggtagggggatgcagcatgtagcgcgtcggaacccgtcgaccttctaggtttcgagttggggaggggctgcgacagctgcgagggctgtggcaatgtcgacattgaggccatggcgaatttgtatctcctaatgcgaaatggggatgtatttaatgggaatcagtgaacgcgatggccatgcgggcagattgacgaggtcgaggttgagcctatgccatttttcagagttagccaaatgaataagacgtgaggattgggcccagtcaaggcccatgagataaacggggattctactgcagtttttttcgccaaatgcagtcttggggggatcgtcaaaaaatacatcgcacacggatgttatgatgttatgattttggtctcgggtactcacggattcaagacgtgtgatgttgcaatcgcgacggggtaagaaagaagtggagatggagatcaaagaaagtcacgaaaggtaataaaagtaatgaaaagtaaagatgaagagagacgcgaagacgcgaagacgcaaaaacgcaaagacgcagagagatcagagagaaatgcaaatcgagtccccgcagaaggtcggggccagactgcgtgtaagactatatttatggatgtctgggtgttttatattacatcgtcttctctaaatccttatttcaatccttatatctatctatcattctctgctctgctcctctctccttctctccttctatcagtccccctagactcactatcatagctgagaaagcactctccttctcttatatctcccataagagccaagtatatgaaaaaggggtcgctaaaccatcacaccttttcgacgttaaaccgaagggggaattcgctgggaagctcggggcatctcatgtccaatgatagacagtggaggtttcaggttcgggtcaggaaaaagggggcgaatgagatgtttaagtctgcagttcgttttttttggtgggaccaatctcattatttcgacttcaaggtaggatcgggagattgggagctgctcctgttgtcctgttgtcctgttgtcctgccacattaccgcttgccctcaagggttgaaggagtagactccaggtactctccctctaaaggtgaagcttgggatgaactcctgttcgagacagtaccaaaaagataacggctattcgaatcaagcaaagattgacgtctaagccaaaattaaaattaatctgacgttgatcctcatttgcgtcccgttgtcccgtgatctgtatatctgtataactatgtacatctgcatctgctgtatacacttatatgactgcaacatacaaagtacagtgtgtaactaactaactagtcatatttatattggatctatttgtcattcggataacctctttttatttcaaactcaatctggaagcgaggaatacatctatgcaagggagcctatactcatagatcgcagccctaacttgaacagtgcgaacagtgcaacgtgatagattggtgatcgtggggaaaatccataaaatccctgactggaggacaatccaatagttgttgcacatgtcaatgtcatgcatatctaggtagtgtctcgtaatacacaatactattattagcgtgcttttgcttttctttgtctatactgtacatcgaatattgtattttgtctctatggtgtcattatttcataccgaaatccagttgccgggcagcactgttgaacatgccctcatccagctcgccgacacgtcgggtcaaatcatcgcccatctttttagtcccacccgatttccgcgggagatcttcattcttggtcggacggggttcaatggtccaccagttgtgccgcaagcactggacagccgtactgcgcttgcggggatcaagcgcacacatcgacatcagcaaatcggcacccaccgggcctgcagtggggaactgtcgcatgaagaaatcgcgcccttgcaacggtaccaaatgggccttgtcggtgggaatgtagtagggcaacttgctgacccctggccagttctcctctgttggtgtgccgaacgcttcgcagattttggaggtttggtccaggtcggtgttacctgctacgaagggaacccgtagcaggagctcggcaaagaccatccccatggaccagacatcgactgcgccggagtactgtcgcgcaccgtaaagaagctcgggtggccgataccaccgagtgatgacctgatgggtcatgttgaacaagggatcggcaaaggatcgggcgagaccgaaatcggccaatttgacctccccatctgacgcgatcaacaagttgttgggcttgatatcccggtggagaacaaagttctcgtgacaccaccatacaccccgggcaagcatccccatccaagccttgatatcagccacaccgtagtgaatgtcactatctttgatgagcatctcaaggtctccaccaggaagaaactcaagaaccaggcttagattttgatccttggaagagaaaacatcgtggagggcaatgacattgggatgtttcagctcttgaaggtacttcacttcacgaaccgcgtccatagcaagtccatccttgtattcggcattaactttgatcttcttgatcgcgacgagggatgacggatcgtgtcggaggtggccaacatataccacggcatatgtaccctctcctacttttttgtctagttttaagttagcaaattgatccttagaaagtaatacagcacatattcagctacctttgacgtatcgttcccgaatatcgatatttaattgttcggtaagttcgcgatccccattctgcacaggctttgccacagctgcagctgcaggcccagtaattgagttctgtgcagcagtggctctgagtctgattgctgtatttggggaatgcacagtcatggatggcgaacgagagccgaagggtgagagtgccatgattagaatgatttgaagcaaaaagtcaaactcctgggatagacagtatttaaaaaaaaaaaacagccacagatactgagtggctattcttaatattaagagatcatctttagcaaaatatcttctaaagtcaaggcagtagtgtcaagacatgagggccgatgtcattcccaagataggctggttcggagtattgttgatcctggactttgttggcgactcccgaaatttctccaagtccgtcaacagcgaccccagccaattcctcggcaactgctggaaaccagtcaatctcaaaggcctcgctcagcagttctcctcatccacaccactacgaatccaattttccggagaagaaaaaagtacagttacgagcaaagtcggggcttgcagcatccttcccgcaacaccttcactatgagcgtcatggcaatgcgcaattcgccgctaggcagcttgacagcgcgcctattcaagcctgtttcaatttccaaccaatacattcgatcactccacaaaaacgcgcccccgcctgtgccatctccgacccctttcgttcccgacgttcagaccttcctcacgctgattggccgcgaaatgtctaagcaagcgagcaagatcccctcatgggaagagcttttcaccttaaactcgaaccagctccgccaagccggcattgagccagcccgccagagacggtacctgatccggaagcgcgagaagttcaggaacggactgtacggccctggaggcgatctggagactgtggttgatggtgttgcccaattgcgggttgttgaagtgcctattaatgccagaggcctgacacatgaaggcgcacaaacggcagttcaaacttcttctgctacactgtcacccggcatggtgaaagccattgttaacctagcgcctgatgtcactacgtattactatggcaaaaaaaacctgatcaagaaatttgcgcatatgaagattcaccgtggctgtcagccgatgggcccgttccttcagcctttgaagggttccaatggtactgctgctaccatttcggtccaggagggtatgtgggaggacaagcggggacataaggttgatggtggcgagcgacgacgccgggaggtccggaacaagaagaggttggatgagagaaagaaggcgtgaatgtgaacggtgaaataccactttgtgtatcttgcatatttcctgttgagcctggatgttcaaattcgaactgtactatactattgctatactattgcaatcatgattctttttccatattctttacatcttttacgtgttttctagggaaagaagcgagatgttgttatgtgcctgattaaaataatatgactgagctatgtaaacgtttagagaaacatgcgattcaaagccgcgaaaggtggatggatattcatacaggaaaatcgtttcggagtgaagaaagagtaccatgatgcgagagctgtcaattccaggcggacttggctcaaggtcagtctgaacctttgatgcatcaatgcagagcattaaaaatgtgatcaaaatttgaatgagaatcttttctaaaccgttactccgatcatgctttgactccacgtctctcatactgaacaaatgatgtacccagaggcttggagaagagggactagaatatggttagtcaaatgccaggtcgatcgcaatagggcatcacttaccgaatagtccgtctcggggaagggtgtaccggcgataggcgtggagaacttgaagtgtctcaccagcgcagccaggattgtgcccagttgcacataggcgaactgttcaccaatacagcgatggcgaccagcaccgaaaggcagataaggactgttggtgcccttggttaccaatccataaccatagtcgatctgctcctcatcttcatccttggtattctcagttgaagcctcatcccagcggtgagggttccacttcagaggctcggggaagaactctggagagcgagcagtaacaccgggagaagagaggacattgtgagtggtgggaatgacataagaagtgccctccacgggcatggggttcttgacggcgcgaatgatcgagtggataggagcgtggatacggagggtttccttgatcaccttagcgtgcaagtcgagcttctggagtgcttcgtgggtaagaggaggcaggtcagagcccagaacctggagttgttcttggtaaagctcctcaacaatctcagggcagctggccaggcgcagaacaatccaggcagcagtagaggacgaagagtgctggcccgccataagcagcgcaatcatcatgtgggcaatttcctcatcaggaatcggatttccattcttgtaggtgcacgacatcaagttccagaccatatcctcggagtccttcttatcaccggctgcgcggcgcgccttgatgatgtccatgtacgtctcggtcatcttcttctgcgcagcatcgcgcttgcggttgtgagggagcggggcccatggcagcatgaagttgataggagcgaaacccttatcgaggtcgtggtacatttcagcaaaggtcgagtcgaatcgatcgcggacttcctgtccttgcaacgagcgggaggctgtgtaaattgtgatttccgcaatgaccttggaaacattgaaagtacccttagggtccttgaacgcggaggagttcttcacaaagtcatcgacctcattggtgatcaagtgaacataagaccgaagtgcctcggaggtaagcccgaatttgacaaactaggcaacaatcagcagcccgactttttggtgtaatccattcctgcataccttcttctgctccatgagcttagcattggggcaatcgtagacgacgtgacgaccgaagacgggggtggtgaggggggagtaaacctcttcggcgttcacatcacgaagcttgccattgagaataaactcatttcccttggtgcctaggtagacggtggttttcttgcccaggaggacaaaggtgaagatgtcgccatactgcgtttaacctcagattagcaattgaattgatccatgggccagccagacatctgcgatcgacatacctttgcgcgagcttggtcgaagaagttgtatgggttcatgccatagctgatggtgcttccaataaaggggacccagtggaagaccacggggggctcatgggatttcttgaagaagagctggcacagcacattgatcacaatcgatagcgcaacgaatgacagtgccccgacgctggccaaagtgtagattgactgggtcgagcagtgctcgcagaaagtggcgaggaaagttgcgaagaggcccatgttgtcaggagatcaaaggagagagagaagaaaaacagcgggaaagggaaagaaaacgggctcacaatgaccctacgaccctgtttgttcgtccaattgaataataaagaaagagagaagaagttgagtgaaggttaaacaggaggcgaaggggaaaataattaagtccgatatcattcggcgagagagacccgcccctttagggagtacgaagtacggagtatggagtatgtgtctagaggagacgccaagcgatataatttgcatcgtaagttatattttatttcttatttggtgttagtgaacctattttgtgtctattttgtgtctgcttgtgtctattttatgaattatctctcttttatgtgatagcattggctatatagccacatcatgccactccggtcaaggggttcccgctagatgggacgtatattgactattgggagtatttaaacacacaggacggagtacatatcaaactattagcgtatggagtacctagggagtacatagcatactatctcctcttgtaaatgtatcatttcacctgattttgacctaataatacatgaaccctatccttttgacacgcccctagccctgataatgatatcccgaagtacacgcaaaagtcaataataataaatcaaaagttgcacaaagccacacagtaccccttaattgtcgtacaaggtgggatcgccacgctctccaatgttgatgaaatctttcggggcccggttgccacttggtgagacttcacgttgggatgccttggctgggcggttatggacacgcttcccggcttcatttcggaatactttgaccggttcctcgctgccttcggcgtgctcgctgaagttggcatcgttgatgctgctcaacaaggtccgctcccgttgcaatttgcgcttcgaaaagtccagtttaccaatagcccccgtcaggccatctgtgctgtcagtgagactcgggtactttccggtcatccaaggatgctcaagacactcatccaccgtgattctcttgtcgacgtccacggtaagcattctgtcgattaggtccagagcggggtcgccaacggagtcccagtacggtgacggatagtcaaacttgcccatcttgatctgctgggcgagaatgaatgggttctctggagtgttcagttcatccgagaacggcgggaagccacagagacagatgtagagaacaacgccaagggaccatacatccacagccttggtgtatttccggtggcgggtatcttgcaaaatctccggcgcaacgtctgcgaaattagtattaacactgcggttccaaggtcatatgctttgtgacttacagcttggtgtaccgcagctggaagcgaattgttagccatcattcacattgacacggacagacatcacctacagggttgtcgtgaaagattcctccccaataattttagccagcccgaagtcacccaatttaacgttcaaattcctgtctgcaaccaggatattttctggcttgatgtctcgatgtacaatacctcgttcgtgctgatgacacgttagctgacccagtactgtatatgtggacttttggtatgcataccagatatttcaatccgtcaaacagctggcggaacacaccacgagtttcatcttcggtcattttattattgttcacaatccagttgaacagttctccctccggtgccaattcaagtaccagataagcgccgccactttcatcgaaggattccttgagacatagtagattcgggtgatgaacgcccatcaacaacgcaatctcttgctgcagagcattgtcgttctgtgacttttgcgggtcactgaggcgtctttcaaagactttgactgcatacttgtctccagtagatcgttcagcacacagatagacggttgcaaagtggcctttgccgagctggctgagaatccggtattgctgacggaaaccattcgtttcccgagtacgggggtagcggaagacaaaacgggcttcattcagaattgaaacttcatcgccgtcctccagttcccggtgcttgttacgcccaacaatggcatcattaacaaatgtgccattgctagagagatcctccagcacagcaaccacatcgcctttcttcttttcggcaaaaataaggaagtgccggtttgaaattgtgggaatctcaagcacgcgatctgactatagttagaacagacactcgacaaccatcaagctattacttaccgcactcaggatgacgtcctaccaaaaatccacctggcgacttagcgctcttggagatttgggactttttccccttggctttggtagtaccatcatcattaccgcaaccattgcgcgtcctcagcacaagtgggccattccccttctcatccagtggtagcaggtagccccagaccccttcagcgtcctcatccttcacatcgtccgcgaatgctctgggtggatacacgaactgtgaaagcgcctgagtatcctctaatcctggcggcgaggaagtcgcgtgttcgggttgggatgagatttgttgatggctgttgcgcggactttcggggggtgtaacagtcacctcattatgagtttctgtggtgacagattggggaccggtgactggggttggcaagtagttcaagtcgactggcgtgtctcgcggttggacctgactcgagattctttgagagcgtcgaggtttcttttggtcttgtgaatctgcatcgatagtagcctatagtaacccctgtaagaaaatgagttgcgccaataggaaaaagaacgtacccttcctcgcttgagcgagcttttctcgcgggggggcataatacaggctattatcaccctgactggagagggctccagaccaattagcgatagttgtcaattcaacggtaggaacgtcaataaagacctttttcgatgccgtaaagaaaatacacaattgtagagggagaaaagaagaagtaacgaagaaagatatgatagtctatagcatgtttgggggaaagagacccccctggtgactctccgccccaaaattgacgagcgcgaatatgagaagtaaagatatgtttagatatggtattgaagctctaaaaccattgaatctgtaaacaatactgtatataatataatacagcatagtatagtatagtccaactagtatacttcatgtcaacaaataattatgttgttcggacctaacacgtgctgtcccctgacttcattcttcggctttccacccaacctttaggcccttaagtccttcacaatggacgggtatgtgagattcttcaatgcttagaggatcatgctaatggacaatcaaagcctttcaggtggaattagacgtttcgcttttgaaaagctcgctgccttggcagttgaggcgcctgtcaatggatcggagcttgctcgcctcgcggagcagtctcagtcgacctccgagtctgatggcgctctgaatgaagtcttgagacaacaggccccgacatcgcaggttccaatggtttgtccctctattgctgccgacccctggtagtgtagtgggtgcaggctaacgtttggacagggaatccgtgaactagatgtcctcctggccctatgcaaggcggcctcctccgtgaacgatccagaaaatgctgctcaattggcattccaactctcccggtacctgccagaatctcacagccagctattccggtcctcgcccttcctccatggcgtaaagccgtcgccttgggagactctcacgaataacctggctcttgcgcttttgtcgttaggaactaaatatccagacctgcgacagacaactctcgaagctgtgcacggatatttgaacaactgcgccgaggctatcgctgcggtcacgccttttcaatattctagatctgacgcggggcgacagggtgttatacatgaatctgttaccgttttgtcaatcgccgtttcccttgttggatttatggaagcatccgcagaatacacttctatctggcatgcgagcgaaaagttacaggtggtcgatcatctgcgagcgatgctgtccgagcctttcctaatcgcggttgagacggcttcgtccactcttcgcaatgcaaacgtcgcggagcatgctttcagagactggagaaaatatacccgtcgatatgctgctcatgctcgcccattaggtgctatgcttgtacaagaaggctatatgcgctttgtgaaatcatgcgcatcctctctgatcgggttccagcacctaactgatgagcaactcttggatgactacatgactggcgttgggattgccaaaagttatgacgaggcggatatctctctagtcgaacgcgtgacggatatcattagtgaggaaattcacttgctagaggatggctccgactacctgcaagtcgggtctccttggcagcagcaccttgccttctctgttaaggggcatgccctagtaggtttccttaactgcgtgattcttggagaagatgcaaacaacaacgaaatactgctatcctggctcgaagatacattgcttgacccccagcaaatgtcgaacgaggaactatctgtgacggttctgaagtgtaccgctatccttgcaaggatgtctccaaatggtgcgtctattggaagacgctgccttttgaggtttctggcccaggggggtgtctcggctcgctccaccgttgccgtcgcttctcggtgccttgctcagatattgactattctttccgaggacgctgtaatcactacactttattcacttggtaatgcgataagcccgagcacgaacgtggaccaatctagccaagaccaactcgttggggatcataccgggcccgggatgaacctcgagacatacccaaaaaatgcaagccagacttcgctctcggcaaatggcgaagatgacactatcacctacaggaatgtcattcatgccattgtgacagttgcgactaattgcaacgatgacaaaatcagtgcattggcccagtctatgctgctccaaaagattggcaagctcaatgtcgcagttgatgcctttatcatccaggaaactgctgttcttgctttgagtggcggacaagccgagttccagcttctgttgaagttctatgcacgtatctacctagatggtgtcaacaaaggactgagcaccatctctgatgctgtccaatgtgccatggtttacctgtcgatcactttggatcaaaagtcaccactccacaggatttatctggtccatttattggaaagcattatcaacaagggtgatgtgccagactttgagtatgagcggcacaaggaaattgtttttgccgcggatgatatcacccccctcttgaaaccactggctctgctcgtgtcttccaatggcagttctaccgggtctgcccggtcagagtacgatgaagccattctaactctgttccgagatgcttggttcaatatcgccatccatggaatatccctcagctccagtgttgcccagcggcatcacaaggaactccgccttctcgcacatcattctccacctttggtggctgaaaaccacatggactctctggagagcgatgtggaattgaacacggtgcttagacgcgggatgggaccgcagcgaggcacggaacagaagagagctttgatttctgaactccctggccgagaatctgatatcaagaaattggactattcaggagcagtgtttcttaacgctgtcgtcttgatcgagagcctccgcgcctcctcaggggactctaccaagacgcttagttatttccttgacccagccttggccaccccggagatagttgtgtgcatgaatgctgttgcagacaaagcggttacttgttatctgtctcttacactttccggggagcacgatgacttttcgaccccttatctgtctaagcagcttgccggattcctggtggcttgctgtcatcgtattgagagggttcagagtattgcaacgcaatgtgccgacagaatcattcgtgaatgcccttctgcattgtgcgaaaagcattcgctctttgctttgcttgagattttgaccgtcatgtggtcttcctgtcttcaaggagaacttgatgagtttgactggaagccgtccttggtttctcccatgggcattgtcaaggtcgaactgcccgacaactatgcgttgagaagagcgactctgaatcggttccatgaacgagccagaatctgggtgacaaccgtcctaaacattgccccattagatgtcaaagggttactccagacctatctttccgaatatgacgacgacggcggctatggacacatttcgatgggacgttcattcgctctcgagatgggttcccttatcccacaaagcgacccacggcttgggtcgatcgatggctacggaagcagcgacttcaatgtcgcatctgacttcatggcactatatacgacacgccagaagtaccgacgtgcggacatgccttctctcggcggcctaggagggaatcttgatagcggctatgttgaacagccccgcgttaatgttttgtctgagtctgccgattctttggaagaaaccctctctcgtctatatggacggagcattgctggtgaggatattccccttgtggaagtgagagatgtccttcggcaggctgcgggacttatttgcagcagcagcaagccacgactctctgtggttcactacttggttgctttgcctttccagattttcaccaaggagatagtcaagcttggtgtgtctctctggcttggggtcattcacgagaacccaagcactgagccacggatcctttgtgaggtgatagaggcttgggagagaagcatgaagcgccgtaaaggattgttcgatcctacctttgaatacattgacccaatgtatactaagattgaacttttgccaactgacaaggatgttatgcttcgtacgcagcaaaaagctcaagacactctctcgccgcacctgcgagttctacatttcttcgagagccatttcaatgccatccgcctaggaaacctgcaagatcaacagctattgtgtcgcttgattggtagtacggctgttggactttcaaagaccggggcccatccattggcaagagaaattcatttccgcattgtgctccttggtctcacggtcctgaggcatttcagcccccgaaatagtggcgcatcttggaaactaaaggatcggattctgtctgctgctttgagttggtttaggcaccctccaaggtggtcattcggaggcaatcggctgcagattaaggcagaggacaaaattctcagcgaggtgactgcggctttacgagctgtggcaggtatcgctgccaatgcgcaagggtcatgcaaatctttgcaagccaaacaagacctgcttcaaatcctcgtggagaatgaacgatcacgccttcgagtttggctcttccccctggaaccggaacgaaagcaccatatgccttcgattggtggcaaaaatctcgatgacggccccgtatctttacttcggcttgcctgggcggaaaatgcagggttagctattcagatggctgcccggttcccgtcacccaaaatgcaggctgatgttaggtcgctgatactcaatttccccgagaaggtcattgaggagccaagcgctctggagcttatgtttgacaactgtctgcctgctgatgtcggttctcagttgaaatacatgctatactgggctcctgttactcctacggaggcgatcacatacttcatgcccgcttacggcaaccatccttatatattgcagtatgccatgcgggcgctggaaagctattcgatggatgttcggttctactttgtgccacaacttattcaggccctgcgctacgatgctctgggttatgtggaccgctatatcctcgaaacagccaagttgtctcagctgtttgcccaccaagttatttggaacatgaaggccaattcctataaggacgaggattctcagattgtaagtattgggattgtcaacttggtcaccgttagctaacatcctgtttcaagccggaccctatcaaaggaacactcgaccgtttcctagataacttgatctcaagcttctcgggcgaagagcgtgcgttctatgagagagaattttcgttcttcaacgaagttacggacgtctccggcaaacttcgcccttatatcaagaggagtaagcctgagaaaaaggaaaagatcgaggaagagttgcgtaagatcaaggtggaagttggagtgtaccttcctagcaaccctgacggtgtagtcattggtattgaccgcaagtctggcaaacccttgcaaagtcacgcaaaagcaccttatatggcgacgttccgcatccagaagacgagatcacgattgattcaaaaggccgaggccaacgctggtgaccatcaccaccagcgccaattgacgaatcattccgagcctgagcaggagacatatgaagtgtggcagtcagccatcttcaaagtcggtgacgattgtcgccaggacatgcttgccctgcaaatgattgcggccttcaggagcatcttcaccagtgttggtctagacgtttgggtctacccttaccgggtgacttcgacagcgcctggctgtggtgtgattgatgtgcttcccaactccatttctcgcgacatgctcggccgcgaggccgtcaacgggctctatgactacttcgtgtcgaaatatggaggcgaggactctatccgattccaagaagcgcgcaccaacttcgtcaagagtatggccgcctactcagtcatctcttacctgctgcaattcaaggaccgacataacggaaacattatgattgatgacgccggccatatcatccacattgactttggattctgcttcgatatcgcgcctggtggcgtgcgattcgagcgcgcgccgttcaagttgacctcggagatggtcgccgtcatgagtggaacccatgacccagctcaccaccagggtggtaactcgggcattaacctgccaggcagctcccacaacccaaccaacacgcagccataccgatggttcgagtcgttagtagtgaaggcataccttgcatctcgcccttacagcaccaaactgggcaacattgtctccctcatgcttgacagtggacttccgtgcttcaagcccgagactctgaagaatttccgtgaccggttcgtgttggagaagagcgagcgcgatgcagccgagtacatgcgagaacttgtgcgcaagtcgtatatgagcgtgtcgactaagggttatgatcagttccaactgatgaccaacggtattccttactaagactatgtagatgttgttttacacttacacaagacattttctccataaatatataatgcattcatcatgttctgtcactttgcccgaagtgtatggttgacgtcacgacttcgccggcgccacggcgtactgatcgggccatccataacacccctgatatcagagataatccgcaggaaataggatagaagatatactaatgaaaatgcactgtaaattcggcatatacagttacctcagcaatgatagagatacctcatatataacagacttcagggtggcacattcaaggcacgaggatctacacatcgtggtgccggaagtggcaagatgacgatgcgaaggcactggacttagatcagacctttataatgtgcaagaatccttgagtgcagtcccaacatcgaacctggatacatggaaattacatattcttactgtatataataaccaccatctcccatctcaaggatgagaatctcattcctcaataagctcagcggtggagggacagggaccaagtccccgccattgacggacctgtcgggagagtcagcgatagcggatcgcgaaaagagaggcagcaacatggacgagtcgcgtgtgccatgggtgacttggagatctgtgttgctaggcgcatttgtctccattggtggtgtcattttcggatatgatactggccaaatctcaggctttttggagatgaataacttcaagcagagatttgcgcagctgaagcccgacgggacgtataagtttaacaatgttcggtctgggttgattgtttccctggtgagtctttgaaaggcgaagtcggaagatgcgtgaatgtggcaaaagctaacgctttccagctctccatcggtacattgataggagctctcctcgccggaccacttaccgatcgaattggtcgaaaatggtccatcttcttctggtgcatcatcctccatgtcggactgataatccagatctcctcgccaacaggaaaatggtaccagttcatgatgggacgattcataactgggttcggtgtgggagcctgttcactgctggttcctatgtaccagggtgagattgcaccacgacacatccgaggagcgatggtgtggtaagtaacaatccaatactcaacattgcaagatactgaccataaccctaatacaacccagctcctaccaattatttgtaacattgggcatctttgtcgcatattgcatcaactttggcacagaaactatggacagcaccgcatcgtggcgaatcccacttggtatcacattcctgtgggctctcgtccttggaataggtatcctcctcttcccggagagtccccgcttcgactaccggaatggccgtatagaccgcgcccggcgcaccatgtcgaagctgtacggtatacccgagaatcaccgggtgatcgtgcatgagattgccgagatccaggaacagctggatgccgaggagggggcgcaagacgggatccgcggttggcttgagatgttccaggcgccgcgcatgacgtaccgcatcgtacttggtgtagtgcttcaagctctgcagcagctgaccggtgctaactacttcttctattatgtgagtgttttatttcgacatagacacccgcactttgctaatatatatagggaacggtgatcttcaacggggcagggatagacaacacattcgtgacgcagatgatcctaggcggggtgaacttcggcaccacattcggcggactatacgtgatcgagcacttcggacgacgcaagtctctgatcgcaggcgggatctggatgttcatctgctttatggtgtttgcgtctgtaggccacttctcgcttgacgttcagacaccgcggaacacgcccggagcgggcaaagcaatggttgtatttgcgtgtctgttcatcaccgggtttgccatgacatggggcccgatggtatgggcgattgtggccgagctgtatccatcgcggtatcgggcgcgggctatggcgttggcaactgcgtcgaactggttatggaatttcctgattggattcttcacgccgtttatcactggcgatattgactttgcatatgggtatgtgtttgctgggtgcttgttcttcgcggtgattattgtttacttctttgttatcgagggcaaggataagacgcttgaggagatggacatgatgtatgttatgcgcgtgccgccgtggaagagcagcaagtggaagcccccggagccggagaatcagctcacgaccgatcagcttatggatcggaaggttgcgaagaaatttaacaaggaagaggaggtgcctggacattcacatgctgagactgcgaatgatgctggggctggaccttcgcatttctcttgagagttggccttgggtgaccttggggtgacacgaagagttgaagtggtgggctgtggcgggctgtatatggaccgaaggggcaatgaacatactttcagtgtatatactgaaaacaggagatgtagagtacttcaaaatgtagtccgataatgagtgaccaatgggtgtcaatttggtagtcataagaataaagtcatccgcatcacctggatgggatgggtatgaaataggctcaaatatatgaaacgctgatcccagagctgaaaaaaaaagactcaaaagttgatgacgctccatgaatcaattttttttttatacatattccacctattttcaaagaaaagggttgggaagacacatcgagaggatggagaccctagaattgatacaagtctgttgagactttcgacgtcaaatgcagaaaaagtaaaaagaagccagaggaggcccagcagcaccgatcgagatatacttcccttgaaaagtgacgagaaccaatctctaatccataaagtcacccctcaagatcttctcctggaagaaatccggcttattctgcttaggctgacggggaatttcccggctaggctgctccatagatgcgatggaagcggcacgctggtggttaccattggaacgatgtggggagacggggccgccgaaggaaggggcacgcccagcacgagagcggagggcctctgaccagttaaagccttcgcctaagggtcggcgtgatacgttagatctctcatccggaggcgaggttggagtacttgcggaagatcgggtggtaacgatggccgagccggccggaggggaacggcgcgggcctacggcagacggaggggggtagtttctaccatttcctatgctccctgcacgagaatcacgcagagcttgtgcaccaaaggagacgcgtctcccgaactgcgagttgggtgaggttcctgttatttgctcgtcgtcgacagcatcttcgactggaccgttggagcccattgagctagataggctgcctcgacggaagttgcgattgccaccgaaggcggacgcctgggtgggagaaccagagaggcccagcgtgttgattgacagccgacgctggttggattgctgacttggaacctgggttttggatgggttgctcggcttggagaatatgtcggcgatggacccacgacgtcgacggttctccgcatgggggaccgagatgggggaggttggatcgttggacattgtcaaaagaagggggttgaaccgagagcaggaatatagacggactagccgcccttctcatataatagaggatttgacaatagagatcaaagtgacgagaatgatctcagcacttggaagggtggggagggtggaacgatgtggaacgatggtggggggtgttgatttgaggacaagacaagattgaaagattgataccagaactcgaacaaataaaataaaagaagggagaagtatctggagaataagttgagaaaaaaagaagacgagaaagcgagaagggggaaatatcgaggttcaccgagtagagagagctaagcatcacattatctggggaaagtggcgctaagtggagtggtgatgtcgatggctgactcagcagtttctatttcatgacatgaggttattctatcagttattttatcagttaggtatcagttaggtaacagttaggtatcagttaggtattggttagggtattggttaggttattagttagggtattagttagtcgattggtttggattgattgttcaactgcttcaattgctatggccatctgaagatgagtacaagactatatatattggtacttcatgtacctattacctatataacgtctacaattgggttatcgtgcagaatgacaaatgctaatccctgcagaaataagggagagcattcgtattcgtagctcaagaaagtaaatatggacgtacatcgtgtattgcttgtttcccataaagtggcatacgtctctgattcctattccagaatgaatcccctctgtcgacatctgctatcataaatcatagaccatcaaagaagctcttgataaccgcaggaactaaagacagaggagatcatccacatgataagaaatcaggaactcaaggcaaatgaaacaactgaatcagcttacgcccgatcgttggctcaatttcggtaccgtcacgagcgattttgatttcccgattcgcattccaagggttacgaaggcctcgagtgcgctggaaaggtactcgctctgtcgaaatccattgaatgcggaacggtttccaaaggtttgaccctcttctggatcctcgggctcgacgcttttctcgctcgcattgtcgttctcatcttccgatgactcgacctcccagaagatagtaccccgcactgaatcatcgatgattcgtccttggggcgctgtcgaagttgccgctgtcagggtcacgtcaagttcgtcgggcccgccgggcgggggatcgggccgagatggcatctccaaggccagttcttcgtcgtcgctgatcggcgacatcatacgggcgtatccaaaatattcgccagatttgttggcggagaaaattaaataaacgtaatctgtgttctgggtaaaggtcagtttcggtcattgctgggctacatagctttggactcacctcgaaagcctgattcattgccgcctcgttgtgcgactgtgtagcccaaatgccactttgcttgctcaactcgagatcctccactgtcaagctcttaacaataaagtaccgatctaccagccgggccgggggaggatggttccccgtagcaggcgctgcggaaccgggctccggtgtgattgaatggtcctcgcccgggtccgtagcagtagtcgtagcagtagtcgtagctgtcgtaatcgtagtcgtagccgtagcattatcctccggacgtggtcggagagcattattcggagctgcagacccggagcccggagcagtgagcccctttcgcagtcggcagacaacgcggacgccctgaaatcgggagtcgtgaaatctcgccaaagctgcaacgcaggcggcagccgacttgtaattcacaaacgcacaattactcttggagatcaggaacacgctctcaatgtcgttttttgcatcttgcgagaagtgatctttgagatcaatgacactggctccgggaggaagatttccaacccacagcgcgtggccagattgcttgggctttcggggtggtcctcgtggggtactcggagcggtcgggagtggttgcgaagggggagtattgtctttagatgaatgcaggttagtaacagttgcaaagtgaggggattcgacaagagctcactggagaacggcggttgtggttgggactgcgctatttttttggggttcgatccatccacgatggtctttgaaacgtcgtactccagatccgtcattcgtttatcggcttctttgcgcaaggtgaccggtttcgagggtgaactggtgttagtacgtactggagatatagcctgaggcatttggccggcaggcactccatgtccataagggccgtatgatgaatgagggtaatagcccgagctatacggagatacttgcccgggattgaggtttggcatgttttgcatttgggttccatgaggcgggtaatgatgttgaggttgagggccagggtgttgagggatggcatacggcggataagcagggtaagacatgccatacggcatgcctccggagttgtgtccatacggagtcattggcatggggtacatcatgccttgcccgtgggctgtgtactgatgcattgactgcggattatagccttgtggatgatggcctgggaagttgtatcccatgaccatatttaagggagagggggcggttccataccgagcttctgcgaagctggaatgatgtgtgacattgggacgtggcgctgaagtaggagatgcacctgagaagagatttagtcaggcaaagcttggacggcatttgaaaaggaagggctaaccctgttctgatatcggggctgtctcgtcagctgtcttgtctgaaggaacattgcccatggggccgttgatgaaactttcaattgtaaccttctgaaaactactgggtctttagtgtctgtagggaatggacacatcttactcgagaccttttccttacctaagtcacgtagcccggatgtcaccgcggtgtaggaattcttatagaaatcccaccgacgcaagtaagacttccctaagagtccggtagaatagaacagaacagaacagaacaccgtagaagaggggaagtgcaaagatctaatccgggaaggaaaaggcccaagccatgcaagttagttctccggattttgtgaagaaaatatcaaggatagaatgtgtgtgtgatggtaagaaattgaaaggggaagaaaaccggtcaacacggactgacccccctcctgttaggccataagccgaagctcacaaaacaaagtaggacaaacacatataaagggattctagataagccacggtggacagtgggctaggtaccagagacaggggaagcttaaggctaactgacagccaacacatgccagaggagggggaagaagtgctaggcatgccagggaagagtactgaattcaggtacattgcgagaacaggagaccatccccgttaaaaagaagggtcacataccgagtaatttggctagtgttttgtttcaagaggcgttgtgttactcgacgatggtctagacagaacctgtttttgggccaaatgggattgagaacaaaagagccgagggaggctggtgaagggagctaaaatagtgtagaatcgagggcccgagaataaaaaaagcgccccgggagtcagatatagggcagaaaaataaagatgcccaagggaagctaagggtaaataagagaaagttaacgttgcagagggatcttgttgatgggggaggtcctgatcctggccctggggggattgaagccaatcaactcttcttggcaggctgtggctcaatggcttagtacatattccaaggtataaaaaaagaaaagatataaaaaagaaaagaaaataagaaagaaaaagcgggatgtgctcgggaagtgtatactgtatatagcatttagagtcgctaatatagaactgggctatatggtcgaataggagattgggcattattctgaaaataatttcagaacgaggatcatgtcattcgagcagctgttgccgtatccctgagctgcaggttgccgtcttttttttttctatttttttgtgtcttccttttttcttttctttttgcatcctgtgatgggtatctgggcggggccagtacaatggtcgcgattggggcatattatgttgggcgtgaaaaaaaaattggaatgacttacacacccgaggagcctcttcgactggaaccaatcgaagtgagagacacaattgccactctcaggggtgtggcgaaagagtcgagaaaaccgcccagggcgaatggtatgtatgtatgagtgtgttccgtgcaacctgtacaacggtacaacggcacaacggtacaacaggtaccataggtacctatgtatcatatacctcggaagggccgaatgagccctgggtccaacggcctttggaaccgtaagaggaaggcaataggaggagctctggatacacactcctactatcatgattcgtagatgttccaatgggatgtttcacttctttgaaacgtagatattggggatacaatgttgtatattgcagtatttcgagttccagcccagtccagaggtaagagcgacatcgtgttgctgtacagtgggacagagcgtacataattggctcatcctgcccatggtaggacctcgcatacatatgtatgtacctcgacaaggcgattatgtactttgtatgaggtagtattgactgccgtttcagagtatatgccacggaaacgtacgtaccgttgggtgggggtcaatggagcttgatgatcctgtaaaaaaaggaagaacatgaatctggacatccagcaagagggaaacttcttccatgggaattgagccaattggaaaaagaaaaatgacgacagaagaagaagctaaagggacaaaaaggaagtgaagtcggatccacccggtttgaccaccgggatcgcatcccagccaatcagagcgggctattcgagactacatacatatcccctaaacaagagatagcagagaatggtactttgtagagtaacggaatacggggataagagcttatttatgtacatatatagtacaatgtatatagatatatcgtatatacactcagggtatgttataatttggctcattggacctatacccgcggactctttctccaaatcaactgaccagtcacttgagctgttcttaactgggtcatgtgactcaccagctctagtggagtactccaattgggttgtataacccggagatttcccgaaaacgggcattgacagtctctaatctagagaataaaagtacaattcaacttcgatcgaaggatgatactgacgacagtggagggtcactgacgcagctttgatgtaatggcacccatcttccaaaaaggtactccggcgtgttccagtagatataccatgttttgatgaagaaacaagccacgtccggacggttagggaattggcgatcagctcaaagactggacgccacattgacacctgaggcgtcactatggatttctgacgtcatgggcgttctccccacatctccatgctttctatactgatctatgagaatcataagcccttctgtccatggacgccatacaggggctttcaactgggaatcattcatcgtacgtatacaccaacacccgccagtcagacttgaccgtcaaggccgtgtcaagagagcgagttgacccattctataatatccataacgcgttatctattattagtggctttgtggctgtgctcctcccactacaaaaaaaaaacacgacgagcccaatcacggcagggatcagcagggatctgagtagggcgtctccattccccatccttcatattgtgattgaccgagagcgaattgttgcaatgtatcgactcttcacagccaccacatctccacctccacatctccatatatccatatatccatatatccgtctcgatttggatgtagtgaaaagtaggtgcttacacttccgtgtagaaaattgcaggtcttaccttcctcgggcacttctagtcgccacagccccacggatgtgcagtttcaactctatgatcgagatttcgtcagctgctggcggtcaaagtgtggaggcgatggttggtgttgccactgttaggtaactggtttctgcatgaccaggattgatcactgtgatatgtagtagatccgaccgaggtttccaaagctcgaaaagtacaagtctcccagaatggagagacgaaactacacatgataaaatagaatgatcaaaacgcagggcaaaggcaacagacccgactcatatttgaatttgtcttagaagacaataatgtgtgaaagtggtacgcaaccatccaaaagcaggattgagctgctagtatcaagaactgacatgaagaagtgaaaaagaagagaaagaaaccaccgcctggccctcatagaaccaaagggcgaaaaataaatatcctgaccatcaaaaaacggaaacaaagagcggcaggaaaatcaaaaaaaagtcatcatcagaggggaattttcatgcggaatctcattaaacactgatataattacgattacgggcggcgcggctgatgtgctagacggggagggtatagacaagatgaagcgcggggaggagccctttatcgatcaattccaagtgaagccacttttcccgcaaagcgagcgccagcgcttcctcttttggagagcttctctctgtctttgtctctgctgtctgtgacagttgaagcgtttgacgaagaggaagactccttgctgcggatagttgggagagagcccagggtatcgtttgcgtaggactttccacctagcggcggtggaggcacgctgaaggcagatgtgcgggcggtccgttggctgagatacagcttggctgcgggggagagaggaatggaaggaggttgtggcgggatctcagcgccgttttggactaacagctcggcgatagggaatgggatggcttttgcgctagatctcgcggcaagagtggttggtggggcgcctggggacgcaggatcggctgcggcaagggctaggaaggttgcgtgagtgttgcgggagcgatcggttatatttacgttgccacccagggcgagaccgtagaggacgccttggatgtcgttctgtttgattgacgcgaggagcgtttcgtcggccgtcgcgaagcgagaacgtggtgaaggcagattctcaacgtaggctcgatcaacatatttggcggtgatgaatttcaaccgttgctctcgtgtagaactggcgctcggcttgagagtttgatccaaggtcgcctcccaaatcatgttgctaacgcggttgccaatctgcaggagaatctcgacgatatcattcgagaaggaatgtacatccaatgtgagagagcgaatcttggatatatgcgtgcccagagagcggtggattccactacattcaatgcagagaatgattccaaggttgatggagacccattcaactttggatgatgatccgcaatcagcacaccagttgttgccttgatccgcatcccgtacaacctgcagaagctttgcaggattctcttcaaagttgctatcaggacggacatagcttgggcgcgcaccgacggttgttcggcggatgacgccagcgttgctggctgagctagaggaggaatgggagtggtgaccagacacagacgagcttttccctgttagggcggaaccaatatcccgactggtaggtctatcattcctagatgcggagggaggcggagtctcctggccttcaaccgcactctgcagcgcgttgttgatagccctgatccaattggacatgtcgtcctcggatgtcgcttggtaaatacgtttgaactggggtgtgatcacttcgaaacagaaccgtcgttccgcgtttcgagcttcacggactgatgccatgcgcagatcgatggggtccatgtgtagatccagcttttgtttccagttgctatactcggataatttcccttgatccaaaacaatccaaaatctgataaaattagaagttgtacaaccattcctgcgcttgtacttacttgtgccatgcttgcttgttgatacccttcggatcgatgtgagatcctggacgtgacagtgcccacaaaaggccttctttgcgctgttggctacttgtccgatcagatccgctgttgtgctcctcgagatcccggatacccttgaagcgattctggcccacattagcagccaccgtcgagtttgacgcgggtgcactgattcctgtagctggtgcggccggtcctgcatttgcttgagacgaaatcgatgaggtgttgctaatgactcctcgaagctgagagcctgtgctatcagccctaccaagctccacctcggtagaagggccgctattggcagtcccaggagggataggaggcacactagttgtaccaaccactacgtcgggctcaagatatgggttactgccattctccagagcccggcgcttctcttcgcgctctgtgcgctggaattggaactccttgtcggcctggtccacctcgtgaataagagcttccagctgaggggtcattccttcaacctttttggcggctgacaggaaattcttggcctggcaactcgcatatttggtgagatgtgagagaacctcttgctctttgcgacctccatggagatcttgcataaaggaggagtaatcaaatcgcctcagttcgaaatttcgccgcttggcttgatacttcgaatcgctctcggcacgcttcttctctttcagcgaatcctgtcgctggcccaaataccgactgacataagcgtaatagtcgcggctctcttcatcccagtccttctttttggcttctgcttgcttaatatcgttgttgtatagtttgaccagaggatcaatcaccagtttctgaagttgcaccgtgttgagctgctcgtagttcagaatttgccgagcaattttctcgaagtaatgatctaacgcgggctgaatagcatttgcattagacgtagacgcatcattcaatgacgttaggaactgttccatggcctcattgcaattggcttgcgctagctgcgcgctctcggctttcttgagcaccttcttgattttggttcgcatgttgcttgtcttcgactctagcgctttcatagtcgcccggaacaatggtccatcctccactccgctcatctcatcacctgcccgcgaatgtgggagatctaccttggctggtggtgggggaggaggcgcggacggcgggggaggaggtgggagagacttctccactggctcaggtggagtgatggatggattaacggtcgattcggcatcgctatagtgagatataacggattgagtcgatgaaatccgagagcgcggaaagacgggtaactccaggtgtggcgatgagatctgagggctcggcggaggacgcaaggagttgtgcacccagaaggaaaaatgggcgagagtgttaaggcggtttgttctttgatcgtaatccaagaagctgcagctgttgcgccaaccgccacctttgtcctctgttaccttcggaggcttccatcgccatgaccattcgaacgacacggacggggtacccccagtggagtaatctccaatcagttgaacattagagttattctgaaggttagggttcgcatggaactctcttgtgatcagattatccagttccttcgagttggatgcgtgagcgaacgtgagtcccgtgagactagtgtctgccacctcgggcatagtcgttgaaacaccgttgacagagtttggagcattgccagtcttcatctgacgaatgataaaggtaaacttgaagatcagctcctcgtcgttcgacaggcgtagcatgaaggtcgggatcggagcggtggagggggtgtcggggtcctgttcggtttgaggggacttgttagctagaagacccgatacatgatattaggtaccgcgtacctgaatatattcgatcggagtatcgtcgccagcatcgcgcttggctacgaaccttgccgccgggaacgcgttgggggatagagtcaaaagacgacgtcgtgagttgcttatcgtgaccgatgcgatcgcgactattgaaatttcatcagcatatcgacaagaggttcagatccggtattttaacccacaacgattctgatccttgaaaaacaagttccccgcatcgtcaaggcgggtggcaacattccccatgatggcaaagggatcaggtcacggcgcgagaaagggaccgaagtagcgggaccaatcgttggccatcgacggtctgcgaacctgtagtcggatggcctttgtattgaagtgtgcgaaggaaccgagtaatcattcagtgaaggtgtctaggggatgggagagagggcgagctcaaagatctgaaggaggggcgaaagttgatcggataaatgcgcaggcacccgaccccatatagtgccatttagtgtgaagcttctttttatttaaatattcttatttggtttcagttatatagttcgatttgtatctgttatatatcatttaatcatctgttggtttggacttgttcaagggcattatttaacaagaacatctaatgcgactacatccatataactagatataacacgactatagcctcacttctgactcaaaatgctataaatataggccaaacttatattaataggatcaactgtacaaatcaagaaaaacaacctggtatgaaaaattaatcgtgaacgtcgtgagactcggttccaaacccgagacccgggaatagaaaagaagagaagaatagaaaacaaaaaaatcagggcatcagctcgcgacttcgcttgtcccatgattgggttcagtgggaatcgcaccagtcgaagcagggcggcgctcacggccagagaagtaccgatgcttgtgcttatggccatcgggcttttcatccgcttctacccaccgcattacctgtcctcgtagatcgcgcatctcgtggactcgtctagaaagatctcctcgtttcttagattgaccactgcgctcattgagctcatcctcttccgagctggagattgacagtgaagacgcgctgctctgctgcaggaacgtgatgacatttcctgcggtcttcttgaattcgcgctgctcgttcttcagattttccattcgttccgcatccgcctggcaatccagagtggtaacgtggagtccggggaagttggaggacataaattcctgtaagagtggtagtttctcgccgttgggacggtaagttccactgtcgttatcaataaagagttcataatcccctggattggttgagatagtgatcccttcttcggtttggcccaggtcctcgccctcgttgtggtgctcatcttcctccacaggaaactcgtctgtaggcaccgtgctcgattctgcgttctctgcattacctgcattccctgcacgttcttcattctccgcatattctgcattctctgcgcgctcggcacgcccttctggggagttacggcgatggcgatgcttgcgccgccgaacgaagaattcacccgaatacgcgatgtagatagacacgtcactgtgcatggtgtgcttactcagcatatcaatgccaaattctttaccggtctcggtgaatcggatttgtccgtccaaggtgagcacataggtgaagatccgtccaccctggccatagtgcgcaaactccaaaaatttctgagagagttcacggcaaggcctttgaaaggacccatacaaggtagtacgatcgaaattgtagatgcgctggtgctgatgatggagtgttttatgcaggatacgccctcgtagactttgtgcctggaacattcccgccacgaagggcctgaactctacatagcgatggtatagctctgcaggtacagggcctgtgagttgcatctcaatagcctggaaactattcggagtcagtatatagatggcccaggggggaagggaaggaagacacacttgtaacgggtaatcgacttgccactgccatctgtgctttgaacatggtctttgatgccagccagtcgtccaatcagaggagaaaaatgtttgaaccaaaagttaggaccgatagtgtacatatgacccccctctgtgccgggggtttttccgagacattcgatgctgaccaccaaccaggactccttacggtgaccagtcgcaaacgcggagacattagtaaatacgtagacgcgcttgctcccaaagcgctttttaaccttgaaggacttctccttgaaacctgcccagtcgtctgaaagtgcaggaacgtcgataaaagcaatccccagcttatcgtcgtgatccgtgggatcctcgtccatgagatgacatttcaactgaaatcccgaagccggaacatttgcgatgatccagtcgcattcccacatggggtttatgtccctgcgtacggtcggagtgcggaaatgcacgtcggggtcttgtttgtggcgcgtcggtaggtcgactaccatatgcgcgtcgacataaggatcggaggagaaactgccaaagtccgcgacgggcaggtcttccgcgcgatggaaagtgatcttgagggtgtagcctggcggggcgtggggaaacggagtgggatcatagcctccggcaggctttgactcttcattcgtagtgagccggcgatgtatcttgtcagccttctcgactagtttggggccaaatttgtcgacgggatggacaggcaatggctggggttgggagtcatccatggtgagtatagggggggaaacaaacgtgggaaatctcttcccagagataaagataagtaaacctgaataatagtcatggaagagggaagggaagaagagagtggagagtccaagctttttcagccttacaaaatgaagaaccgtgtgagttccctcaagtctcccctaagggccccccaataaggaaagatgagcgcaaggcaacagagattataccgccaagcccttgccaagacctgcctagcggcaccggataacgtcattgggctttgtctggttcccgcgccttcttttcagggggtcccgaggtcagccctatattatgttgatgttgtgcatgtttacatatttatcttctctatcaagtaacttgaaatacattaaaggcaaaaaaaaagtaagatacccagaataagctagaacacatcataatcgtacacataccgaaataagaataagataataggcattaggtcatgagtatcatgggggaaaagacaactccttgcgcgaggactgacgaatgtggcgtataaagaaaatggtttctctaagttcctcggaagaggaattgcatgtcctccggggtcagtttttccaatgccgccgcttgatctttattcagggtaccccggatgaggttggccttcttctcttgaagttgaatgattcgggactcgacagagtcctcgatacagagacgagtgaccatacaaggccgctgctggccaattcggtgactgcgatcggcgctttgccattctgccgcgggattccaccatgggtcgataataaaaactcgggaggcttccgtgaggttaagtgccacgccaccggccttgagagagactaagaaaacctcaacctcgggtttagtcatgaaatgttcaatggacttttgccgctgtgctggggtcatcgatccatccagcatcacggtgttgaatccggcatggcgtagccgccattccaccagttgtagcatggatgtgaactgggagaagatgatagatttaggggtgtgacttttgcttcgctccttgaaaagttcataaaggagcatctcgattttggtggaagaggtccagctctccatggagatgcggttgatgatggaattcttcttgacagactcttcgtattcggcaagggtaggttgttccaaatcgatggaaagggcaatatggcaccgtgggcagtcaacatgcttgctatcgtcctggaatgactgaatgtagtccttggcacattgacgacagaattcatgacggcactgagaccgaatgccatcttctgcgggctcgtcacagatacagcatacagcaacgttgaaccctaattgcgcttttttcttcagaatgagatcgggatggtttgcaacttggcgcatctgcatgatcaacccgaagatgttggcatagttattcaacatgacaccctcgctgacataggtgtcgaattttcttgtcgagttcgtcataatgctgcgtgagaaatcttgttcgatctcaccgaaaaattcattgtgtaacatgatacgtttaggtgggagctccatcgacgttgtatgctgttgcttcatccggcgaagcatgatatgatcggtgatgagacggagcttttcgagaccctctttacgttgccgctgagttttcccttcaataattgggttaagaatctccttgttgaagatcgaaatatgcataaacccagtgtgagagcactcagtacaacgcccctctttagtcgaggtccactggagttgttcgcaatcgcactgcttacaaaagtagcatgcaaatggcttgacttgtagaaatcgcagaagggagaagaattctccaatccggttctgtacgggtgtgcccgataggcaccacttgtaattggcctccaaggcaaaacatgccctagcaacacccgtggtacgtgatttgatactatgcgcctcgtcaaggatgaggcggtgatagtggactgcgtggatgacactgtctgctttgaccatcgttgcaccgcgagagaagcctttctcctgcttgcggtaaatggattcgagacttgcgtaggaaatcatgatgacatcgtacttacgaatctcagccggcgtcaactttttgattttcgcgtccgagttgtggtagaccaagaccttcagcttgccatccgtgtattccttgatctcggatacccactgcatcaaagcgaccggtgggacgagaacgagggtcgggtcagactgggggaaatcggacatgatgagtgaaactgcttgaatagtctttcccatgcccatctcatcgcccaacaaaccacccctgtattcagtcttttcctgagctatcatccagttcaagccctctagttggaatggcttgagtttgcgagttatagagacaggttgcttggcttcctttggctggatgataggctgtgctttgagcacatcccacatggtaccaactgtgggatgcctgtacacaaggttctttcggtctttttctacctaggggatggttagtcatggaaggcacgtgggaaaagaaccctcggcttacacggcgagctttccgctgctcttcccagctcgggggcagatctgcttcagagtcgtgcagatcgtcatcgagaccgtcctcaagaggatcttctgatgtatccgaagaagcaacgccagaatgaagtaacccaggtggctcagggctcaacggagagaaggacactggtctagaatctgggtccgagtcgtattccaagtgttcatcaacgaatttgtctacgagcgaaccttgttctgttgtcgggcgcgggtagtcgtattcctccatttgaagggcatgagccagagccgcatcagaagtctcaagatcattttggacagacagagtacccataggccgttttaccgccctttttttggaggcatgagttagtgaaacatcggaggcaccagtatcctccgccagtgccgctgcggatcgttttcttcctccttgggaagctccaagggatagtgcgctcgactgtagtttctttacgcgatcagcggcattgatacgcgccgaagtctttatcgcaaccttggtgtcaggttcagtaactgcagcaccaacgctagtagccggggtactgcagcccgtggtcagattccccagcgaactccgggaattggagtcactgggcgattcatttttcatgggtaccaccacctcaatcctgcccgaagcagaattacccggtgtcaccgaatccacgacatagtcgtcctcatctgcctcggaatcttggatgacgcgagggcgagaacgagaaagggatgacccaccagctcgcagaggtgccgatcgacttgatcgacggaggggggatgaatttcttggtgacgtctcgctgaactgtgaatcatcgtctgaatcagggattgtggttctgggtctcagattgtgcctcatattggaaccaagcgaatataaagagggcggtaatgagactagaggctggaaccgggcgtgggatctcagctataacgacagatctcattagccgcgttcaaaatatatagggaagtgacatgggggatgtacctagaaaagcgcgactttgcttgcttgtggtacgaatgtgatcagtcgctagacgacaggagatgggataaaagctggtataagccgcaaattagagaggtaaataaataaatgagagatcaaaggaaacaaaggaggaggatgagaagatggaaagaaaatgaaaggaggatgcagtcgggaggcagcaggtgcctgaaccagagaaatattttcctcggaatcttccgatgtccctttcagttccttttcttcttttctttcttggtggcaaatcatcatctccaaattcatcaagtatcaaaggtctctacatctctcttcttccgcataattccctcctattcccctgtcttccccatcgcccaattcttatctcagataagaccgcgttaagtgaaacgcgaaattgccacgggtccagtgactcgggcccagaccgacttggagcctcactttacaacctccaaatatgtgagtagtgctatcctttgtgatattatccaaactgacaagtcaaaaaggacaggaaggagacaggcaaggcggacaagagagccaaaccagcctcagggcattcggggcccgtatgttttgcttcccataaccttatccccccccagagactcactgcacacactagacgctctgccttgaccgactatcttgctgtatgttgatgttctcctacatattatgacttggctgactggttgtagtcaaataatatctcagcccaacaaattcgtgatgattgggaccgccggcaagccgaggcgcagcgccagcctgatcaagctgaacaagaatcatccaatgcagctgaagaatctaggtccccatcggtcttggagtcactagatgaccctataaaaaagcgcaagcgccagcaagctattgcaaggatcaaaaatagtaaggagtttgctaaacgcaaggctcgctttagtggcgattacgatgatgaggaagacgacgacttccttgcgctacagatccacgaagaaaagaaccggccgcaaccgggtcagcttgcaaactgtgaaatctgcgacaagcgtttcaccgtgactccctatagcaaggccggtccgaacggaggcctgctttgcgttgattgctctaagaagcaaaaggccgacgagaaaaaacccccggcaaagaagcgtgcccctggtattggacggcgtcagaatcaagctaatctacttgatgggttgacacctcatggaactcagagtctactggaaacctgcatcaaggtatgtacacagcattcaaattccagggaattgagcaaggagtgctaattgttccatagaaagtggcagattatatccatgatattgaggacttcggtgatttgcctccgtccttgctgttacggctcggtcagatcttgtctagaaggcgggccgtgacctcacgaaccttagatctattcttacgaccccagtacacatccatcgatttgttcgattgtgctagtaagtcagagttatttcctcttgtttgaacaaagaaagtctaaccagtggctagaactcggcacggatgattaccacaagatcctggcttccatgcctcgtctaacaagggtcaatcttcggtttaccacaccaatgaaggacccgatttttcactatatgatggagcgtaatatggagatcaaagatctccacctagatgggccaaaccttgtgaccgatgcctgttggcgccaacttttcatgaaacttggtcatcgtttcataagcctcaaactatggaacctggatgatgcatttgataacgaaaccgctcgagtgatgtgtcttcattgcccaaaccttcaaagactgaaattgaagttcttacacaaaatcgacaatgagatgcttgaggaaatttcgacgctcaagtcccttcatcatttgtcgctgcgctttctggctgagaccgacgttaagaccgagcctctcctaaaagtcatcagtagcattggacgtcagctggaaaccctatctctggaggaattcaacctcgtcgatgatcgactcctacagcatatccatgaacattgccgtcatatgaccaagcttcgtcttgctctcaactcgaccttcaccgataaaggtttagccgcgttattcacagactggtctaatccggcccttacctatgtggacttgaactccctccgagacgtggacatgacgaacccggccggcccggaagagcctattgggcttgcttccgacggcttcgtcgcgctcatggaacattcagggttgaagatccaacacttgaacatcgcctcgtgccgtcatatctcatacaaagcgttagagcaggtttttgcggaaggcaaaatgtatcccaacctcaaatatcttgatatttcctttagcactgccgtggacgactaccttgcacagtgtatcttccggtgctgtcccgcccttcagagactggttgtttttgcttgcttcaagattcgcgacgtccacatccccaggggacttgctctgatcggtaccgtgggagcgactatcaaaatcgacggaatcacccagagcgagacaatttgagcggcgctacggtggttcgacaatactatttttcctttttctctcatgtagtttggcgatattgcgatctgaatcaaaagtctttgaaaattttcaggcaaacttggttttctccctagaatcttgacaacttataaaataatctgattaatttatctcggaataatattagggacgttatatccaagatagcactgcaatagcttctacatgtctttttttcgtccctgaagctgtagccaagaagaatacgtgcggtgagaaacaactctttcatgtgtaatatatgatatgatgtatttatcaatgctcccgaggttgggacttgctaaatcattcatataaaggacatcattcgtttactatcatgtacatatacgccaaacaccatgatgtatgtaatcataacccatatatctcaagaaaatgcaaaccaattgacagaacccatgctctttatcccattctcttgccaatctcactctgccagtttcgagacctctcaaatccattggaggcggtctggtagtcgagcatcgcctggtaaacctcatcctgagtgttcagtacaaaaggtccatactgaacaaccttctggtccagtggctgaccagccacaaggaaaatgcgggcatccttctcggcgttatccgggacagagagttcaacaaagtcaccagtctgctcgaattgaacgtttgtgaattccttcacgatgcgagtggaatcattcgagccaaagacagtctcaccagccaaggtgtaagcaaatgagttccatccctgtggtaggggctgcgatatacgaccaccgggcttgatcgtgatatccaagatccagacaggggtgtaggccaagtcacgcacggagtcaacaccgtgcgactggcccgagatgaccttgatcttgacgcggccctcatcgactgtcgcgaggggaatctcctcagcgcgaagatcacggtaacgaggctcacagaatttcagcttctggggcagatcgacccacaactgcataccgacatttgggctaccgtcttcgttctcgtggggcatctcagcatgcatgataccgcggcctgcggtcatgaattgcagatcgccgggtccgatagttcccttgttaccggcaaagtcttcatggtcaacgccgccggacaacaaataggtgatggtctcttgaccgcggtgagggtggtctgggaagccagcgcccttaccgatcgtgaagtggtcaagcatgaggaagggactgaagttgcggagcttggcagttccgatagagcggcgcacacgggcacctgcgccttctgcttgctcgatggcaaggaatgcctgtcggatagcgcgagggacggacatgtctgtgatggggaagactgtgggcgtcggggtttccaggttcaggtggtggtttgtctgattgacaatgtttttggtctgaaggtgctctgacaggctaggagcttgttgctggataaatgagaccaaagagtccttgagagagtctttgatagaagggttataggcaaggaagattgctgtgatacaaattaaaagtggcagaagtagtttcatggatgagatgtggactatttatatgccaaagaagcgattgaaaagagaagaatgttctgctgggaaggaaaatgctgtcagcgttagtcaatctcataaatactctttgtagtatccatcctgggcatcgcaatgctttgcaagacatcagtcagcctggtccggccaatgagatggcgtggctttattaccaactttcccgtcagcagccgctaagcaaagagctagccagatgtggttagcgttggtacctgataaatgaggtactaatgctgagttcagcatttcaaatcaggtgaccttggaaattgggatctataagccatcagtaattctgtggatataagtatcgatatatgcgtgctagagacttccatacggagtgatttcatgagaaatattaaaatactcacttccttgcattctacaatatgtacatctgcttccaagtggtacaagcgttacgtcgggagcacatagattggtcgttatcagataaggccacgaagcagccgctctccaactgccaaacctgacatgcgaggaccgccttgtgggtaggcatttgattcattccagccttggaaaattgcttactcctgtctttatataattacactgatacccatatgcgattgatttacatgaaaaacccttaccattgccgaattgaagcttcttgcgacaagcgcctttcgcgaggaagcttcgggatacctgacttccacaacgcctagactccactgtcatccttggtccactgtgttctaatctgatctgttctaagagatgggtcactcagcaagcctggcgccgtggctggtattggcatgtgctgtgtctagcacgtgggcaaacaaaaaaccgttcaacattaatgacgatattctggcttatccccaggtaggttggatggatctgtcttgcacccatttaaagcaaacctaacgttggatattgcccatagtatcaagtgacattccccgaggagtatgtgcttgaatcccacgccgaagcattgctccgatccgaggccagccccggcgccaatgaccagaacaatccccaggtttacataggaaaggatagaacggactccaccgcccaacctgaggatacgaatgtatctctgttcacctacgaagagatgatactagagaaccggcgactcctctgccagatcccacgtgtcacgaacgacgaccataatacaacgagagacaaggaggatagcaaagccgaggagcaaaaggaactagctcgggcgacagatcgtggcctggaactcctacgtgaaatggaggggaaatgcatgtactatttctccggctggtggtcctattccttctgttatcagaagcagatcaagcagttccatgcgctccccgctggccgtggtatccccaactacccaccaatcgaagacactcagacgcattccttcgtcttgggaaagtttattggcgacaagggcgagggagagaaacaatccgcccagacagatgtggcagagcttcacacgcagggcggctcacggtacttggtccagcatctgcgtggcgggaccaagtgcgatcttacgggacgcgagcgcaaagttgaagtgcagtttcattgccacccacaatcgacagatcacatcggctggattaaggagctcaccacgtgctcttacctaatggtaatctatacccctcgtctatgtgatgacgtcgctttcctgccaccacggcaggatgaggtacacactatcgagtgtcgtgaaatcctgatgcctgacgaagtcaccgaatgggaagcaatcacagagtggtacatgaccaaccaagtagccgatgctgctgcggatgcggatgcggatgccgaccaagccagcctcccgattgtcggaggaatcgaagttggcggtcgtaagcttgttggcatggagggcaaggtaattgaaaagggacgggtggtatccgcaagcgaggagcgagtggaggtggtggtggttgcgaaacgcgagaatggcgaggtccgaaaaacgtccaagcaggtactgaaaaagtacgatatcgacccggagaaactggaagagatgaagaatctactggaagaaagagcagaaggcaaagactggacgctggaagttgttgaaagcaacggcgtgatcaagttccaaggcagctttgaagacgacgaggaagacactttgaacgacaagccttctccagagaaactggatgaaaacaaggtatctgaaagttcctctggccaaaagccaaagcaggaaacagagtcggtcgaaaagaagaagcagtcctcaaccaagcctgaaaacagcgagggtagcgaagagacctttaaagatgaactatgacatttatagtagatcttgtacattttgatgtcttattttttacaatcctcatatgaatgatattgtgtttattttctgcgattagctgaactaggaacattactagcctacctcggtttactataaatactcattctggacttcatgcgaaggtgcaaattttgtctaagagctaattcgtatcttacgtgatatatattacatgcaatccatttacttcagaggtactatccgagtgttttatgcttccaggtgtcgtgtataggtacatttatacatttaatagatgtttatacgcgtcctaattctcaagatttctactgtaggaagcgttctaatgttagatacaggcaatttgattacaacccacatacctccaaggctagtgtattaaccctatattaatcaaatatacagccgcagacgtacgtcagtagccttgcggagccgaggggcgctttggataaacaagtagtccggagtatcaaagaagtacaagacagataacagcaagaaaagaaaagaagaagaggaaagaaaagaaaaggcaaaagaattccactgaagagaatgaaaaaaccacatagttcactatagctcgaggcaacgtgactgtaacctccctatcgcctatggcccaccttcccgccctctccctctctcctaatccaacctcaccctcttctttcctttccccctctctcaatcccttgcgcctaacctttttctctacctccgcgcgccccgacatctgacccgtacccgcactaaggagcgccaaggctgaccgagcaacggacagcgtcactaattctaccggttcttcccctacatcactgcgaaacctagagctggcacgttgagacgctgccatttgcagcggactgccttcataattgatcgccgtaggaccacgagttgtttccaatatgggtttcatcggtgtatactcggctgtgtacgactaccagccacagggagcgggcgaactcgagattcacgagggcgacctcctctacattttggaaaagaatgcggatgatgcctggtggagggctaaaaagaaggctagtcgggaggatgaggacgaacctgaaggcctagttcccaacaactatgtcgaagaggtgagtctccgccgatggcacccgcgcaggcctcgctgcatggacaattgctgatattatatgaaacaggtgcaaccagcgcacagagctacagccctcttcgactatacgcgacagaccgacgaggagatttccttctcagaagatgctgagctgatggtgtatgacacctcggatccagactggacgttggttggagccaactcggagtatgggtttgcgccgtcgaattacatcgaaatcatcgaggatacctccgctgaaactactccccctcctcaaccttctgttcgagccgagcctgccgcgccgacgcttccgcagcggccgacgcagactgcatcggaagaaaccgaggcatcccccgccgcctctccggttgatatgtctcacaaccccgctgctgctgcgatcgccagcatcatccataagcagcatgcccctgcgagggtatctgccgagacgaccagagatgaacccccgccacccagtcttcccgtccgaccatcgtacgatcaagaagaggaccacgaggagtctccgccgcctagtctgccacgtcgaccaccttcggaacatgcgtcccccactatgaaccgttactcgcctgacccaactccgccacgtccccagcaggcggcgcctgccatgggtcgtgatcggacacatgtcaaagcatcacccccttacaaccgggcaggtgagatgacgcctcggtccccttccggctatcatatctacaatatcaatgagatggttgaagtgatgggcaagagaaagaagatgccgacgacattgggaatcaacatggctactggaatcatctttatctctcctgaaggcgatgatcggcagaaagaatggagtgcagagaagctcactcattactcgatcgaaggcaagcatgtctttgttgaccttgtcagacctagcaaaagtatcgatttccatgcaggtgccaaagacactgcccacgagattgcagcggcactcggcgagatcgccggtgcctaccgggcagaaggactgcgtgaggtgatcgaggcaggagaagggggcggtcccaagaagggccagatcctgtatgactttatggcgcaaggtgatgatgaagttacagtagctgtgggggacgaggtcatcatccttgatgatactaagtctgaagagtggtggatggtgcggcgattgaagaacaacaaggagggtgttgtccctagtagctatgttgaagtcataggattgataccgaaggcgcctttgatgcctcatgaaccaggtttgtcgagtgtggaaaagaaccggatggaggagatgcggctgtccaaacttgcgatcggcaagtcacggacggactccatggattcatcggaccgtcacagcaagcgcgacagcaaaatcaagtcgaagcccgatatgactaaggtgcgaaggtggacggatcggaccaaggatttcacagtggaagcccagttcataggcctccaggatggtaaaatccagcttcacaaggtgaacggtatcaagattgccgtccctgtctcaaagatgtcagttgaagatctcgagcatgtggagaaagttgccggcgtctcgctagatgaggacaaacctctttcaagcatccgacctcgcgttaccattggcaatgattccaaagctggggcttctgtgcaacgttccgattacgattggtttgacttcttccttaaggctggcgttgggccacatcgctgtgagcgatacgcacagtcatttaacaaggacgcgatggacgaatctgtgctgccggacattacatctgaaatccttcagactctgggtctaaaccagggtgataccttgcgagtaatgaaggttttggatgccaaatatggccgtgccccggacaagaccaagcttcgaaatgtcagtttcggtggtgaggaagtcattggcaatggcgaggacggagggcaaggtggtctgttttccgggcccggtggtgtgctgcgcaacaacactcgcagggccagaccaacaccaaacgttccagccggagaggtcgatcccaaggcgttcgggcagggagaggaacctaaatcatcagacagctcggcaagcccaccacctgcagcagctgaaaagcctgcagccggatttgaagatgatgcttgggaggtgaagcagccgaagcaacctgctgggccacctgcagccaccccgacgccaccgcctgcggcagctcaggttcctcagccaacaggggcaatggcggatctgactttgcttcaagctcctttgcagccgacgccggctcagcctactgcaccagctgccccgcctatacccaccctgcagccgcaggccactgccgtgcaatcaccagctatacaggctcaacaaacaggtgccactcctagcttgtttgcgcaagtggcacagataggacagtatcaacgatctttcagccctcaacagaccgggttccaagcacaggccagacaacgcccacaggcccctccgacagttgggcataattcacttctgcctccgcccccgcaacgcccactgtccgcgcctcagaacttctcgcaactgcaaaactcctttggccctcctccattgcaagctcaactgacgggccttccccaggcgggtcctccggttgctcctcctggccagagtctgaccgaaataaaccagctacgttaccaagccgcgatgcagccgcaagcgacaggatttatgggtcaacctcaatatcagaatggcttgatgccgcagcccaccgggtttactccccagtcacaattcggtatccagcaacagcaacagcaactgccgtttggtagccagatggcccctcaacaaactggattccagggacttgggccacagcccacaggctttggtggatatgggcaattccaacaaccaatgcagactggtatcaactctgtccttccccctgcactgcaaccgcaacccactggtgtcaatggctacggcaaccagtcctacacatctccgcctcctgtgccgccaattccccagcaaccaacagcgacccccctgtcaccacagaagaccggaccggctccccccatcagatttggtgtcaagccagatggtcccaagaagcttgagccacaaccgactggactcagagccaacctttcgcaagctagtaagtttttcttaccattaaaggtggtaaacttgaacagaaactaactcaatttacagcccccaataatccgttcggcttctaaactgcttctgtgcttgcccatactagactggcgtatataattctggtttcctggcaatttcccctatattgcctcaagttttgctcatactgaggctaggatgttcttttcacatatcgcagtgtcctttcgaaccagtgcccttggaatcaacacgtgtacatatcatgaccctggtccccgttttgacgcagcgcgtatcgaagctcatgccacgaatcctcttcgtccttttcccttgcaaaacccccgcacttagcgagctatccatattcctttcctgtgctctgacaggtctgattaggcctctcatatcctgcatttttctttgtctctagcttattgtcatataaatctgcctatggtgatgcttattgtatggatgccctctctttctcccttttctttgtctggatggttacccttttcgctctcgttctctccctttctaccggctcatacataatccatggagtcgttggcatttgcttagtctacgtactccatgagtaaactttctatgcaccgctacccagatcaaactggtacctgtaatatgaacatatatcatcacgcaaaatacatagtgcagttcctttcatgtctcagcttcagaaacgtatagtgttgacatccaatttagttcggtgcactctaacctgaccaatgccacataaattctgttatgtacagattcatgcagaaataaatcgattcgcccttgggggtatatatatcaacacgtccgaccatacaaaaaagttataagagagcatcataatccccgaaacaatagggagatctgtactagtacacccgcttttcatcgcatcctctaattcgttttccgacatgcactgggtaatcatggctcatctccccagatgccaaagactggaagatcctcagccatatacagcagaccgttatccgggaacatcacgtcagaaagtggagatgggccagacgctgggatcgggccggaaggaatagtcccgccaggagagcagccgaccgggatgcccgaggtagttaacgcagaaatggctgcatcataagacaaagctgcggtggggtctgcgccattgcacagggcttcccaaacatcgttgtcggttgagagttggggttgagggagtggttgggagggtatgtaggaggatggacttccaacgggcattttgtcaggagatttaggggataatgcagttgcagatgcagatgagtgagcagcacttggctcagtgaaaggtggggctcctggggtcggggagttgcgatcctcgtcaccgcctacttggccgaagagctggtcgacctgtttgctgcgcctattcatccattgtcgatttcggcgggaaacgtattcggttacagcagcgcggaggtatttgataatttggaagaaacggcatgcatgtggatcgtgcggaacaaatagccctagaaaccgttcggctttgttcattccttcttccaaggggagaagattatcgtagtcggcgaagaatgcagcgccgagaacgatgacagagttaaaaacggagttgatcaagaagggtagtcgacgtggaagggatgcgtaatggcagagatcatcgaccacgtctagacctcggagtgcggaatagacacatgcatcggcaaacaatgatattcgagagctaccgtttcgagtttcgggggccaaatcgagtttgcccttgacatactgggcaacacgatatattaggaatggccgtgtcaacaggataatcgaccagtaataggacccgaatacatgagctgcggctaagctgttttccatggatttgtgttcgagccgctcagtctgcattttgaggattgctggcagagtgcgaacccaagcccgatgctggttcgatatcatctctgcaacattgatcgagatgacttgcttcatgtatacatcggtcaagatccgttcgaatattcgacaaagcgagatcaccgcagctgaaagctgttggtctacagtcaaatggtgctgtgattcgcctgatataagagcatcttcccgtatgtcatagtcgtaatctgaagttgcgggagggcgtcccagggaggcgctgagaaatagatccatcatacgaagactcttccaaacgcgctcccttgctcggcgctcacgcccacaaaagagcgcatttgcatccttgcggtggattcctaccgcgtatgcagcacgcagagcaattcccagattcatgaatgcaccattgcgcctgcatgcgccgagcatatacatggaaaccaaaacgtatgattgaatggtggatatgcttggggtttcctgaaaggccgagaacgccaactgacggccgctgccaaaatattgctcagctactgtctgatcaatatcggaaacctgagctccaatggcaaggacaagatagaaaatcgagctaacggtatcttcgtcacccgatgggtttgcaacccaattagctagccgtggatgaaattcctccagatcaaataagtcaagcaacgggcttgtagcaagcacaaactgacgagctagtcgttgggcttcgtgattgcttggtggcgcaactagagctccggactgagtgcttgggttgccctgaaaggcctcgagcattgagtgtcgcgagttgtcctcggtaaactcacatcggccaatggaagacgtaacaacacggcgcagactctgtaagaacgacaaactcgccgaatcaccaatatacataaactttccctgcccatcgcgcagaagtcgcgccacctttggcacgggagccgtcccttccttctcatctttttcctggcgttccatattcattccttggttctcgagagagttcaaaaggcggtccattgccgtttccctctgcggagatgctaccatgcgctcactgagcaacattgtcgaatccttggcgtccggcttgagtaggcgggcaggccggtccgagaaatggcattccgactccttgtgcctttgaacacagattgtacatggttgttccccgttgcatttttgctttcgccttttacagctgtcgcaggctcgtcggcatcggaggcgtgctcccggggtagtgctggcccgaggcatccctatcgccgcgctcgcgtttggtgaataggtcgggtcactcgtccaggatttcagtggtaatcatcgaggcgtgagatatatatgaaccgattaagtcgggaacgatctatattgattcaagtcattgttgaggcttaatgaagtgctaagcctgttaagtgcggccgtctgctttccccggactccaccatctgactaagcagattcatcccacctgggcaagatgccccaggtctgtacatacggagtagatgaacttggaatcaaaatctcacatgatgtattggtgcattgatatgacaatacatttacttcaagcttacttctccagaagatcacggccggaacgatactatcttgccccaggtgtcggcagtgccccaaatgccagtccgcaggcattctaactgcacaatctggctgtgatccacaaacaggttgacatcaataccaaactcacgaacgtaccaattaaaggccttgggatctgcagcttcaaacatgatatgctcaggaggaagctccttcatgatcttcgacaccacatcagtccgccaggaggtgacgttttcagtgataccttctgactcaatcatcaaccgcttcacaccagcgttgaggaatctacgacccaagtttactaatttgccggggtcagaggtcccaatcgattcaagtcctgaggcaggtgtgtctccgccggctccgaattgaatccccaattcaggcttcggttccaacttgtatgagtggactttatcaataagtcggatccagtcatcctccgggaatgacagaaaaccggaagacaattcgatgacatcgaatctatgttgactagtcagattttatattccaggctcctgggcctcgagctgaggatgcacgtacccgagatccttgcattttttcagatagcggtcaaacaccgtatttggatcgggatgtgtgaggagatgctcagcccatccaccctaaaaccggtgtcaaatgcgccaatttgctggtctaagacagtcttaccgttgagacgtacacgccgtgctcatgggcaagatcgaccaattcccgcagtggcgtctcgtgaaaaagagtaaaagcacctgggttggtgtttatctcagcgctctcgtttctggcgacagccgaagccctgctgggactcacctccggcaaacttcagaccatctacgtgatcgcccatcctatcagctgttgtcagatgccatttggttacgtaggtggggacatttcgaaatattacgtttcgagaatatccgcgagatatcttttacccatgacctagtttaggttagctccacagaaaacgatgatagggctatatggtacccactgagtagtatgggcctcggatctccgtgactcccttcgttctaggcttggcaggtctagggtttgaccgcacgaagccaaagccattttgcttgtcttgcagaagagtgatgccttgatatattttcggggtgacagaaaagtgtctagatggggtcgacagagcaattgaagtgcgactcattatacgcccggttacaagtggattaacaaacatatttaggcagttactggactagttgagctatccacatgagaaatcatgtatattgggagtgtcgacgtcaaatatacttcatcgaatcaatgccaatgagattacgtagtatattacatcattttcgaaataccattacaatctacaatcatattgtattccttcaacatacggcgcacaacatatgaagttctatacaaccccggctcggataccggagactctgtaacgcgaagtgtttcggcgttcggcaagagcagacccgatcttgtacattttatccatccatgatgccaccgttgtagaaggtctttctcggatgacacaggtaccgaggtatatgccttgaagtaccactttatgaataactttatatacatgaggtcgttgtatatctccttgtgcacatctctatgcacatctctactccgtacaaccctagctatatccaatcaatgtcagggaatccccaaactacagtctctgtatccagccacgctcctcgccaagaacaaaagccagccttgtggactcagctttcacacatcgattcgatatagagagttatacccaaggaatagccaaaaaaaatatgcaattgattccggtgactcccgccctggccctggcacctgccttggacattcgccgattttcgaacacaactagatggccctgaagccaactctcctcctctattacctacataattcaaatcccctcattcttaaagtacttctttataggctgctagggacccttcttcttcttctttcaagtcgagagaacgactggtcccttggtctgatacccatcatgggagctggaatggtcatcgagcctttggtggttattgttctcttatttggaggcacctggattaaccgctctgtcggatcatcctcgactaaaagctacaaccgacggaactcgaacgaccttggacgagccgcttcatttgattctttggagtcgggttactcaagccaatcgacaaaggatggtctgctgagccctcgctcccactcaccacaagccccggaagacggatggcacaagcgacaagttggacttttagggttgaatttcgaggtatcctcgccgaatacgattgtattccaagacagtttgctcagtcgattgcttcggaagtttcctttcttggtggaatgttggtattgggctttggtttactgggtaggttgatttgctccttaacttaccatcggtcttggctaaaccaaactcacaatttgtatagacgtaccagctcggtcgtgcctttaccgccgtgactctcaaggatgacaccgttgatgtcgcgaggaggcatgcattgcaactaatcgtgatcgaggagaatctgggaatattctgggagaccttgatacagagacgcttccttcgccatcctcttgtcatgccttggatcaattggatgtactcgttcatacacattcctgggacaatcgcgtttctcgtttggctctattactatactaccgtgcggaatcggatcgacgaggctcagcccggaaagcccaagggagctatgagcgggtcgcctgcaggtcctcttctataccaggcgcgtcggcggactttggccgtgtgcaatctcctcgcattcgtggtgttcactctttggccttgcatgccacctcggttactgagtgatacagccgtggatggtgacgagggagatctagcccgcagttatgggttcgtggacacggtgcatggtatcaagggatcgggcagtgtgtggactgaaaaccgcttctgtaaccaatatggcaagtgttgtctggaatcctctctatgaatccttggctaactgttaccagcggcgatgccttccttgcatttcggctactctttattgatcggcctcacactgatcacaatccctttgccgcagcaccaccggcacacaatcctgcgtactcggctgacccgtgccttaagactggagctcccgtcgtggcgccgcctcgtttgcgtcatactcggcttcctatatccgtttaccatccttgtagctattgttgccactgccaaccattttattctggatgctgtcgcaggagcgcttgtatgtgccttggggtggtattttaatggggtgctgctcaacctgttgccactggaagactacttcctttgccttgtccggatccataagcctgagccgtcacttctcgatgtccacgaggaggagtgtcccacgaccgaaagtgtttgagaacatggcatccgagtacacccatagttgattcgactttggattcagcgtctttgttttagaacttgataccctgtatgaaaccccaccagaccgcctggtctggtttataatctgtctacatgaacctcccttagttattgttacccagttctctctgtgggattgatgtctctcccgtacctaactttcgccaattagtatgtttatgcaagaaatattctttgcttcctagaagagaaatatgactattatctaaatagttcctttgtagacagtagagcataattatcaccgtacatacaaagacaatccgaatattacaaaaacttcatataatatctctctcaaatccaaaatagaaatacccctggaaaaaacatcagaccaggaaaggaggaatcgcatcatcttggtggggtttacttccatagaactttagatgcgtttaaatcaactcatttgattccatttgtccctcgtattcgctcacctcgttcaaatcagcagcccatccaatacttattatagtgtgctggatcacatattacacggttgtcacggtcgacacaatgacatgaggaggtacggagtcgcaagctccctggatgacccttgagttctgatctgctcgtgattacacacctctcgagagcattgaatacacacttgatacggtggcctacctcgatgtgtattgcgactctaccgctttagcgatttgcgattgcttgcaaacaataattgagcatagcaccgaggctgtcatagtgttgtggctataacaaaaggaacacgtcacattcccttacattgcggccaggttggtttgaatcaatgaatttgcagttaatttgaaaagaatctaacctgaagaacagattcatccacgtgcctatgccccgaatatcgcggtgatagctcgaagtatacatgtctcttggcacttgacagtatgtggtattatatgccagtgaatgaatgcgagaccagaagataacgaagacaaaagagcaaattgactctcgtatgtcaccaatcgttgctattgcgccgtgttgtccagatatcggtgattgtgaaggcatacagcaaagacgtccatcgactctttcggctactgtgtgctacaatttatcgatcttccagcgagacatcagaagaggagaccagaaagaataacggtcgttcctttggtttatgtcgaaaacttggaatatcagtctgcccacgatccgtgatatgcaatcccaccaagcgtcattacttccccttgatacctattaggagctgacatcgatactccattggcatcttggatgcatattcccatcgtgaagtgcttgtctattgaaaaccttcagagaggtaactatctagagacatttctacggagtacccctatgcgcgctgtgcaatgctcttccattgaccatccaaataccttgaaacatttgaaatccaaaaagcgaatcaatcaatcaccctcatcttctaatttaccgtctaagccttgttgtgtggtgacttgaaacttgtggcgtcattgcggtcttccgttctcagacgcgtcttgaagttcccgcgcctttcgcgactctctttcttctccacatctctcctaccctccctcccctggaagctcctcccaccacctatcccagtgccaatctacccaatcgccctgtgaattttcactcatctcattccagcttgccattatggctgacgatacccctgtctctgcgccccaaggcgagcagcccgagcgcgccactgagcaacccactgactctgagaacaagtctgaggatgtcaccttgtcggaagacaagcctgccggtaagcatagactgattgatatcaagttatcgttttgcgactccatttttcaacgctgtcccccggtcgggacatcctgtttctgtgcgacgccactaacccgctgtttcttccagagactgaagctgcgcccgacaagaagacggacgctgaagctgagcctgataagcctgcttcctctgatgaggctcctgaggccaaggccgatggcgaagccgccgaggctgcacctgccgatgtggaggccattgcgcccgcggaggccaacggaacccctgcctcagcgaagaaatcctccaagaatcgccggacctccactggtaccacccagaagctgagccgcaagaagtctcagagtcgcatcacccacctggacgctaagccaggccaaacctatcttgcccgccttcgcagttatgcgccctggcccgctatcatctgtgacgagggtattctgccatccagccttctcgaaactcgtcccgttactgccatgcaaaaggatggatcctacaagggcgagtatggtgacaatggcagacgcgcccatgagcgtaccttccccgtcatgttctttgataccaatgaattgtgagtcgaccatccgcgcagcctctacgccagacgcgaacttctactgacttattttttttgtacagcgcctgggttcccaacactaacctgactcctctcgaccctaccgagtgcaaaaatatttccgagaagaataaaaccaaatcactcatcaatgcctacaaggttgcatccgagggccacaaccttcagtatttcaagaagctgctgaacgaccaccaggcagctattgaccaggaagaggctgagttggaagctcaagaagcggagaaagaggctgccaaggccgcaaaggaggccaagaagggcaagcgtaagagcaagggcgctgagaccgatgttgaaatggaggacgcggatgactccaagaaatccaaggctccttccaagaagcgcaagaaggatgctgagaccgatgctgaggcggaaaaggtatgtgttacaatttcattgtgttgtgatctctcatctcacgaaattatagcctgctaagactcccaagtctaacacaaagctgaagttgaccacccccaaggctcctactgaggatactggcaagaagactcccgccagcaagaccaagaaagcacctgccaagaaggccaaggcagctcccgttgccagcgatgaaggagacagtgccgatgctaaggaatctgagaagccgattgacccagaggaactgagaaagaagaaggaaaaagagagtgagagatcccccatcttccccgacgagtctgatcaggccagcttataccttacagttttgttcctccgccacaaactccaaaaggggttcatttcccgcgaccaaccccccaaggaagatgaaatggctagcatggccggctactttgacaaattggaaaagcattcagacttggaggtctcgatcatccgttcgactaagattaacaaggtcctcaagatgattgtcaagctcaactcgattccccgggatgaggagttcaacttccgtcaccgtgccatgggcatcttgtctagctggaagaacatcttggacgcagacacccccggcccggcggacaaggatgagaagtcggccgttaacggagccaaggaggatggtgttgaaacccctaaattggagacagaagaggaaaaggagctcgagtctaagtcgaccaaggacgttgattccccaatgcctgacgcggatgagaaagcccctgagcccgagaaggaagaaaagcccgaggagaaggcagctgaggagcccaccgaggagaagtctgaggaaaagcccgcggaggctgctgcttgagtggtaggatcacgactctgcgatatctattttcttactcctatccatttgcgctctcattcaagttctcttctttgtttctgtttcaatctacgcggttccgccggttttgttttctttttcatcttttttgtcacctgccaatgcaatactgggatacggggctggaccaaccagcaaggcttctttgaatcaattgaaaatgtgattattgttttttttttaatcggcttctgcacattgacctgtgttctggccatggagtacaggagttacccggcctggatcttcccagaggttgcacgccaatgatcgcttcgatgtcgggctggttatgcaccaaatcgggcccagagtatcggagcgaatgctgttttatgtgcaaatgcacagaaagttccccaagggtacgtaatggagagactatgtcttattcactgcatgtattgagctcttgaatacaaggatccataatggcgttcagtaaatcagtaaatagtagaatgtatgttggtaagcctctttcgaaggtcaaagggcgtgtgcaattgggattattatgtctatagaatctctatttgaatggagtcaaggtatcgacgtatatgcccggctctctgcaaaatcaaaaatccccgcgccttctatatatgtatgcagttatacatcacgctgcttgaaaacaaatagaaaaacaaaatgccggttcgatggaatctccagatttcctgtcgaaatcactcatgcatcgacagcgatgacaaccacgacgcagatatcatcaactttcccgccgcggtaatagtcaccggggtagtagcgctgagcctccttagcaaagggcccatcacgacgatagtcgatactagcaatcttcgcctcgccagcaatcgtcgccgcgagaacagactgcaaggtgactccatcctcaggtccggactcggtgtgagccgggttcttggaaagcggcgagcctggcggagtcggaagagcaccagccaatccacccggcgcagcgagtgcacgcagattctccgagactccgacgccagactccgtagccgtccacgcgcccgtcagaaccatacggctcgtgacgagcttgagaatgtcctgattattgatattatcaaaaacaccatcggtagcaataatgagtacatccccattctgcatctgcacattcgtaacggacgcatcactagggaaatcctccaaaaacgccccgccaaagacagacgcctgggcgcgcatacgcggcgggatcacactaagctggtacggggtgttgaaaccatgcgtctgcggaatcgagtaatgatgcaccgcggccctcctcaacaacaccgagccagaatcacccaaattggccaactcgacccgtccatccggcaaggcgacgccaatagaggccgtactcccacctgcccggatcgtcgaatccgccaccacctggtcgtacccggcctgcaggaggtatttagagcgcaagcgctcggcgggctcgtgccaggtctgtgcggtgtgcgccatgtagttgcacaagccgtgggagaagtcggctgggtcgacgcgagattccgtccagccacctacgccatctgcgacgccgaaggcgactgcttcggcgtttgtttcttggtagtctgagatgcgatttccgatacggcttacgaagaaagcgtcttcgccggagtctgggcggttgcgacggcgactgacggagtttttgtcacttgaaacgcctatggcgtctgcggcagggtcgaaattgtatgcatttttgatggggtggaagcggcggcctttgccggaggaggagacggcgacgcggtaggaaagtttcgagggagagggtttctctaggtgggttgctagcgttgtgtggaaggctcgacgcgagggttgatgggttagattcaggctgaggtgagcatctggtctgactcctgcggcgtgagacgagaagcggacatgttgggttttgaacagcgaggaattgtatgcgttcggattggtggagattgaatatacgccatcgcggacgatggcttggaggctgctgcaggcggaactgcaggctcgacacgagacacttggcggaatcatcgccgatcgggggcttatatacagttccctcgtgaaggatagggctccaatttgggagcgagcgtataagacagaatccaaaaaactaaaaaaatcaaggagctgcatgaatctcaatggataagacagtacccgcccttatcgtctgaccgcctcgcgtcattagtttttcgttgatacctgattactcaggcagaaattgtctttgtttgggatcggacttgggattggaagaaacaagagaatctgttcaatgttattctcatatttagttgaatttaaatatttctacttccacgcgacgttcgtcaaattgcatgctcttcaacgctataccgccaaccaaagtttatcaatgattctgccgcccgcaacatcttgtctcccgccaaccttttcctctaccccaattcttttcttttactcaagcgcgagtctttattaatctgctttttgagccaccggagaagcataggcttctaagtcgcccaagatgatgcacccatcgcgacaagcttatgttgaggagacagaggatacagacatggggggcatcagctatgccgatcttcgtgagtagttctcgaaagcttcgatttgaagcttcctaataaaataatagccatggaccaagattacgatatgccctctacaccagggggtatcccaactgagcgcgcctccgccatcctatcgcaattcgaacggaaacgcagagcagcagcgatggtggtcccaacagatgacacacgagtgcgtgcgcgactacgggaactcggggagcccattaccttatttggcgagggaccatcagaacgacgcgatcgtctacgtgaatttttgaccgatatggcagagaaacaaggcggaggcgagatagaaatggaagaggccgaggaggaaggagaacaacaagaagaatttttcacagatggcgggcaagatttactcgaggcgcggaagaatattgcgctctattctttgccgcgcgcaaaggctcgagtggctcggctcaaggacgaatcaacaatcacacttcgaacacatgtcaagcatcgcaaagctgtcaaggaaaagctacaaggattcgatctttacgggtcgcagattgctggcgatcgtcctgttagcatttgtcgattcgcgccggatgggcagaccatcgctgctggaaactggagcggtgagatcaaattgctcagcgtgcccaatctggaagaaaaagcgaccttcaaggcgcatacggatcgagtgggcggcttgtcgtggcttcccggtgccactctacccggatcgaatgtctcaccttcaactgtcaatttgatctccggaggcggcgaaggaaatctccacctctgggctcttgatcaagaaaagccactggctacgttatctggccattcggcccgtgtatgccgtaccgagttccacccttcgggccgatacgcagcatcggcatccttcgacagttcatggcggctgtgggatatagaaacagcaactgagctgctcctgcaagaaggccattcgcgcgaggtatatacagtggctttcaacagtgatggctcccttgtggctagtggtggattcgacagcattgggcgtatctgggatctgcggacagggcgcaacgtgatgatcctcgacggtcacattcgggagatctacggtatggactggggagttgatggttaccgggtgctgtctggttccggtgacggcttggtcaaatgctgggacttgcgacagatgaaggagacgggcggtattggtgcgcataagagcgtggtgtcagatctccgctggtacaagggtgcagaggctgcgtcattcttgccttctaccgatggcgggatggacattgatggcgctgcaccggctgcagcggaagccccgtcgcccaagaaatccggcacattctttgtgagcagtggatttgataaaagtgtcaacatttttagtgcggatgactggtccctagtaaagtcgctgagcggccactcgggcaatgttcttagcacggatatcagtgacgatgcaaagtggattgctagcagcggccacgatcgaacggtgaagctttgggggattgaatgattcggggttatagcttgactattcccctgtctgatgcatcataattggaaatcgtacacaactcaaggaacaggctgtatgttacctattgaagaagacctatcattatctacatcgctttcctgtgtaattcgtagtcacgtgccaaatgcggggatgacgtaaagcggtatgccgagagctttttatcaactttgaagttatagcacttccgttgaccttcccttgactgtaaaaacactatatagtcatggctttccgtccacagaggattgcacggcatttctgtcgcacaaaaaccccacggcctttatcacgaccaacctcgttatcaaacacaagtcaagatgcatgcctcttctgccgatatcgccagccagcgcgaggactaacaaccctcccaacacgtggacctctcatagcccggacatccaagatacagcaccgctctgcctcaacagagactcccaccccagcagaaccaagcaaaaacacccttgccggcgcgccagacataaccaaccactacacgatcttccctcaaacgctaccagcaggcccgccaccagcctcggcgttcgcaattccaaccagcgaactccgccgcgaattcctccaactacaaggcctcgttcacccggacaagtaccccaacggagcggagaagcagcttgccgagggcctctcggcacggatcaatgaagcataccggacactcctggacccgctgcagcgggcacagtacattctacgggaatggcacgggatcgacgtgacggcggaagatgcgtcgactaagcatgcgcttgatgcggagacgctgatggaggttatggaggtgcaggagactattgaggaggtcggagggtctgctgatgcggaggcgcagatcaatacacttaagaaggagaatgaggcgagggttcttgagtgtgtggggagacttggggaggcgtttgagaaaggggatttggaggctgcgaggaaggagtgtattcgattgcggttttggtatagtgttggggaagggttgagggagtgggaaccggggaacacggagattcggttgatgcatactagttgatcggtggtttattttgtaaattattggatttgttttgatatatttggatagactacgctactctttttacatgtgacgtttttgacgtttggagaattgaatgtacaacaggcgttgttcgttgtatactcccaagggtgccaactatatttgtggattcacgatgggatggtgaaatacgcttgttcctggaatagagggggcgagggatatatttaacctgtaacagcggagccagaggtttcaaaatgtctatttttatagacatctgtaaatattttgtgaatctcgtcgttttttccaacctcggcataagattaggtagcgtttcagggcaccgttgtacaaccgttgaccgctacatccaacatgtccagaatctcgaggacaaagaaaaattcaaaccaagtgaagcttcaaattcaaaacgatggagcttgcaggagcaaatcaaccagtgaggcccgagattgggttctccgaaggctggggattgggcacaaacctgctgatgccaatgtcgcccaacaattggacaatgcatgatccagttaacatcggctgttctgtatggctgctctgtgtggctgctctgcgttgttttttgtgtcggtgatagcggcatcgcattcaaatggttcaaacggacgggtgggtggtggccattggcatccggggggggggaccaaatcatagtatatcgagagaacagtgtagggcgaacacataccacggcaacatcaaacctcttttggccccatctgcatatcgcatatcgcgagttagtcatttggtctagcgttaactagcacaatgggtcttggaaagggttcatgcccccatcacagctgcacacgtagcaggccactctcctcgcccgagatcgcttccagcgccttgggaattggagcgtaaaatatttaatggggctatcccgcatgttagaacgtagttttcttcatctcatcccttctgaagcggaaggtcaactgtcatggagtctgttcctaacttcaataggtatggagagcgcatctcagctatgatataggtatagactgttagcagaccgctaattcaacatcttcagaatcatccattcagcgtcattcaccttcctcgtcggcccacaacatacaaagctgacgatccagtcggggctcgcccaccatgtctctaaaccactggatcatctcatgaacggcccgacgagggaatcgaaacaccgaatcgccgttctggaagaagacgatgttgaaaccttcgttgctttctgcgagtatgcatacactggcaattatagcgtgcctcgtcctgaggtccaggaagatcacagacttggagtagtcgagagctcgacaattaccaactggagagggaattatcggtctgattcaatgtcgtcgattgtgccacccccggctccatcgccacctccgcaatttcgccatcggagacaagaatcgtaccagcagtctgagccttcgcccgcctatgtaaaggaaccggttactccgacatttgcgcgagagcccgaggccgagtcggctccagatcccaagactccagttagtatagcggagccggagctagagacataccacgaagcggagactgcacccgagccaccggctgaagaagtgcctcctgccgacgatgagtgggcggttccgaccgaagaacctgtgtcatgggaatcagaggagcctaaggcaggcaaaaagaagggaaagaaagggaagaagggtaaaaaacaagcggagatcgtcgaagaagaacctcccgcaccgactgagcctgtcagccttacgccgccatcaacaccgccgccagaagttgctgctgagccagaggcagagccagaaacagagcccgctgaagaatggtctccagtaaaccctgtcccagaagcagaatcagaaccggctgagtactgggcacagccagctgaagagcctgcacctgagcctgcacctgaacctgagcctgaacctgcaaccgaagagcccgcgcctgtagaacagcccacacccgctgcggaaggaccgatggaagattcatggactcaagacagaagcccaggcaccagcgttaccaaagcacagccgcaaagaccaatgctcgacatgtcttttgcccaacagaaagcatcctcatccagcgagcctggtctcaacctatgggacgagttcatctctctgcagtacaacgacgagcccacagcctccaagcccaccccggtcgagtcgccaagcactgagctcccctacattaccttccacgcgaaattatacgtcttcgccacacggtacctaatccccgctctcgcccagctttgtctccgaaagctgcatcacgacttagtcctcctctcaccgacggaattcgaaaccccccacctagacgacacggagattctagacggcttggcagcaaccaaggcgcagatggtgctagagctggtgcaatacgcatacacgaagacggcccgactagagccgatctcaccgacatccgccacacagcttcgggagaatgagctgcgtcgactggtagtgcactatttggcgtgcaacgtgaaagaattgtcacggtatcattcggcagaggattcggtctcggcgacgcctaatttgcggccggtagatgccaagacggagcgggctgagacctccacttctacgtcccctaaaagtcttcgtgctttgttagatttgacgacagagctggcctccgatctggtctatcgcatgatgtgagtggatgccgagatgtgattgggtctgggatatgcccagacttttggtgttctattttctgcgttaacttgatatgattttatgcattgatgccctcgagatgtttcgaaggaccgcgctggcgttctgttgcacaatttgaatgtgtcattttctgttttcgaggtgcattgcattatcttgcatttgtcctgcatgacgttaatctttttcttcttttctttctttccctttgaatgaatttgcaatttagattgtgtccatggctgtggtatagtcgtagccttccgggtgatcggtggggtcccgtcgacttggtaggagagagtggactctatgaactccataaccgccagaccctgattgtatcaagtgaattcctgatgacatcgacatgggtttcatcgtataggtcactctcaaacaaggtggcatcttggcaaaacggccaaagataagccaaccaactcaccaatgacgatccaaacatccccccttgaaagaagatcgaccgatcgacaaagatccatgtccgaatagtctcttggcaggaatcccagcgtcaatagtgctgtttgatgggggctgtgaaggctgtgagggtcgagaagttcaggggaaaggaagcgccaagagattccgaggtacgtcaacctgccaactccacctgactttgtgtcaaattctcatctcaacttctctccttgattttcagattgcgtgtcttctattgaatttgttctacacgtgcatactcggtacacgcaatggtgtgacctattatttcctctcctccaatcctgtctctgtcttcataatcaaagcttggcagcggtccgtcaatgtactggagatcgctcttggcatttggcgtttaggcacgttggaggcgcattggaatatccctgtttaggcttttctatacatctgatgccctatcgggagggctcggcgtcaaaggcaatcaaagtcggcccgtaactcggctttgagattcatcatctgagtaacctgtctctgattcaaagtgagtgttgaactgacacaaatgcacagattgtcaatcagcctactctgtactctcccaacgactgggtctccattcagggaaaatcactacgcaatggtttctacatgttcttggcagagctggactttccacccccctaggcatcgaagttctatatgcctaatgctcagatccgcagtggatctctgtgctttcggaactgcccctagaggcacaaaccccctgacgcatatggagtatgaatcgtccgagcccaaaatcctggccgatctattcttatagatttctccatgaattatgggtccgaaatgctcgttgaggccgctggtaggtccattgcaaatgattcctttgccttgcctaccttgtatataatcccctttcggtttttgatctttttcactatcaaaatgtagagtcttggaattccttggctgatctttagtgattccgaaaaaatatgaaatcgatatgcttggatgttctgcccatggtatattaacatcaccctttcgcaccttctccatcacttccattcatcactcatttacttcaattcttccagacttgacttgaatttgcttttttattcattctatgatcaattggtctatagtcctatcttgaatacattccacctatactccttttttatgttcaaaccttagggctgcatctatacctcattgcatacaaacacacacacacacacaatgtccaacccagttctactaggggtctaccctaaccacagccaagagcttcagcctccatctgcaccgccgtctgcaccgccgtctgctcactccgaaacacccttcatggaatcagagaagtaccagaagcagtacccactgagcttccgcgatcgtctccgccatttcacatgggcatggtacaccctcaccatgagcgcaggaggcctcgcccttcttatagcgaaccagccgaacaagttcacaggctaccacgagatcggcctagccatctatctgatcaacctcgtcctcttctccctcgtctgctctctcatggcagcgcgattcataatccacggcggcgccctcaactccctccgccacgaacgcgagggcctcttcttcccaaccttctggctctccgccgcaacactgatcaccggcctggagaagtacttcggcgagaaccccgccccatccttcacagccacactcgaagtcctcttctggatatactgcttctgcacattcactctcgccgttgtacaatactccttcgtcttcacctcgcacacctaccgcctgcaaacaatgatgccctcgtggatcctccccgcgttcccaattatgctaagcgggacgatcgcgtctgtaatcgccaaaagccagcccgcgcgcgcagcaatcccaatcgtcactgccggaatgaccttccaaggtctaggcttctgcatctccttcatgatgtactcgcactacatcggccggctgatggagagcggacttccatgtcgggaacacagaccggcgatgttcatctgcgttggaccaccagcgttcaccgcgcttgctctcgtgggtatggcgcagggactgcctgcgacgttcaacgtgatgggcagtgaggacactactgccgacgggcggatgctggagattctggcgttggcggcaggcgcgttcttgtgggcgctgagcttttggttcttctgtgtcgctgctattgcggttattcgggcgccgccgacgagcttccatctcagctggtgggcgatggttttcccgaatactgggtttacgattgcgaccattacgcttggaaatgcgtttgacagctccgcgattaagggcgttggctctgcgatgactatctgcatcgtctgcatgttcctcttcgtctttgtcaaccatggtcttgcagtctatcgccaggatattatgtatcctggtaaagatgaggatacctcggattgagatgtccttccgacaggtattattgtctctcgtgctgtttttgatttctttcttgtcacttttggtattttctcggctttttgcacagtccttgttcgcgttggtcttctttcattgcacacactactgtcatctcattgcggtctttttcattttgattcccaattcttgttgattctccctcttactctttcgattcaaaaaagcgttcaagcattttgttttctttgtcttggttctatgagaactctgcatctccggcgtctcatgtcctgtctgatcttccatctccttagcgactactacatttcaatagaattagaacaagaacatttcatttcattgcaatcatttcatacctgcctagtaataataaaacaaaacaaaaaaaaagaccaatccgttgtgtacaagtacgcagtctaagaatcagaacaaagaaaacaagtcacgcgaccgtaagagccctacttggaagccttcattgcaaaacaaacacaacactgcagagcggaaaaaacaaatcgcaaagcgcaatcaggaaacaaaacattgaagaggctcgtcttggcttcaccccggagggttactggaccccagcaccacgttgaggtgcgagccgtcgctggggtaaatggcagaataaatggcaagatacatggcaagataaatggcagaggacatgggaaagcaaacatgatgacaaagtccctctcttcacttcccagccggcaccaggttgccccaggaccggtgggcagaaggcgggggataaatggtgaacaagaaaaccgaaagatgcaagatgaataaatggcagaagaagttgcaacggagtccctctcttcacttcccagccggcaccaggtttccccaggaccggtgagcagaagacgggggataaatggttaataaatggcaaggctcgtcttggcttcaccccgaagggttactggaccccagcaccacgttgaggtgcgagccgtcgctggggtaaatggcaggataaatggcaagataaatggcagagaacgttgtaagcagacatgatgacgaagtccctctcttcacttcccagtcggcaccaggtttccccaggaccggtgagcagaaggcgggggataaatgataaacaagaaacccgaaatgtgaaatgtgaaatgtgaaatgtaaacaaagcgaaggggctcaccgttgcttcacccccagcacccggtggtgcgcgagccgtcgatggaggaaggtgggagaggatgtgtaaacaaaggacggtgacaggaaaagggggaagaggaagaaaacaaacaagtgatgatgatggatggatgggtggaaatgggagatggaggacgatgaagatgaatatgaagaatgggaaatgagagatgagaaaaaaaggagggatggggagatgaagaagagaagagggagatgggggagacagtggtatttatgggagaaacagtcgatggcctcaggatacacctggtcgccctggcaataactatgtatgtcaccattatgtcaatatgtatagaagtagaagagaagacaatgatattgaatcctatgtaagagattgtcaccttgctcagcaagtttttttgtgtgggtatcatgatgacaggaaaaagcagtcttgtgccgcacatggcttcatcgctgtgaagcgacaggtcgagttcatgctcgacagtcaggccttgagacgtctaagcttcgtggagcacactggcgcgcactggaaaaacggccagaaacacgtgacgccgacggcatctgatggactaccacgcggccccatctgctgggaaggagtgaactgctgaggcgagacttccggattggtgaaggccctcagagtggtagacttgggatgaagtgcgaaagccgttcacagcagcttaagcaatctttctgccgacgttaccgatgccacggccgacgatgctgacaatcacatctccatctccattgtcaggtgcgtctcggataccccagccgggggcaccaaacttggacagatctcgagcgagctggaccacgttgggatcagcaatcacatctcggccaacctgcagccgcccgacatcctccgatcccatggtcatgagagtgaacatggtggtcgcagccgcaggagccacacaaccacccttggcaaccgtctccagaagctggaatgcacactgctttccaacttcctcgggggcttgaccacccgacggtggagaggccacatcagccgagaagaggcagcccgtggaagactctgccaccaaagacaaaccaaacccaaggccaatctttttctttgcctgggggttggtcttatccggagctggtactaaaggcgcagacgccacgtcggagaaaatataagtatcagggctgagtgggttgaggataccacgggcagtctcaatcatgcgagcgttgttcgagccagacacaccaaccgagtataccacaccgcggatgcgcttgatgcggcctgcgttcatcaagtgcagagtcttcggcagacggacctggtggccaaacacaagttgcacttcaccaccgccacccctgccagtggggccagtgtttgatcgcctcaggatacggagctcgatgttgttgaagataccaaattgtttgtacagagggaggatcgctgtgcgaacactgtcgacggacatatctccagtctgtgtcgacgatgtgatcacaccaggtcctgtgaagagcaccttcatgggtgctttggcgaatggggccagcagacatagagggatcaggaagtaactgagaccacggttacagtttgaaggaagctcgtaggtgatcatgccgccgctggctccagtaccggccgtgctgccggtgattagacccggcttatagacaagcacagtacctgtgtatgagatctccatttgagagccattggttattgcatctagaaggcggaggaaagaaatttcatgaggcgcaagaccagggttcgtgggcgacgaagaacgaatttgggagatgtgaactgtgcggccggtgagggtggacaaaaccaggcgatataccaaattatgatgggatgtgaaccgaagggggggttgagaggtggccattttgtgtggttggtcaagtctctcgccgttaatcactgcaggccgactgttggattcgagattggaaaaagaaaaattggcggagggaagttgatccgggccgattgtttaagtccggggtggagctgatatctccggggatcagatcatcgttttcgctttctgacggttccgacctcatgcgacatttgcgaaaagctaccaaagtagaacactgacaagatcatattttgatatattcacgatgcttccaccagcactaaacattcccaaatggcaagtccaagacttaacatatctttcttacaatgcttccgaggttcccccactatatgataccatgattcatcacgcgacccataagcaagctatctaaacaaaagccaactgctaatgaaatctatccaggctcgaagagaactcccatctcctccaaccaccggtcaacaactattgcgtctaccacccctccgccacagccggctacacggtgatgatagtgggcgggcccaacgcccgaaccgactttcacatcaacacaaccccagagttcttctaccaataccggggatcaatgctcctcaaaacagtcgacaactcaaccacacctgctactttccaagatattcccatccacgaaggctcgatcttcctactgcccgcaaacaccccgcactgccccgtgcgattcaaggacactgtcggtgtcgtgatggagttgccgcgggctaaggatgcagtggatgctatgagatggtattgcaggaagtgcaaggagattgtctgggagaagaagttcgtttgtgttgaccttggaacgcaggttaaggccgtagttgaggagtttggggccgacgaggaaaagcgcaagtgtaaggcttgtggggagattgcggcgtcgaagtatcaggatggggaaattgtgcaacccccgactcatcctgagtagtatactgatcaggtccatgaggtgaggttgtaattctatcagttatgagtggttatgagtggccaattcaatattcctcgatgataaggatagaatagagatagagtagaatgagacggatacgttcctcggcatatcaatgggcgatccgagtcgaggatatacaacggaacatgggaagcagatatacaccaacgaacatcttattatgaccaaaggcatagtatttattacaagtacaaagccctcaccgtgttcccattcctctgctttcctccagctcccgaaaaagcaaacaccatttattaaccgggtaaccgacccaacaatcatgtactagaaaaaacaccccatagatgcatgcaacagagctgtgacagagagctgtgatcttatgggatacactgaatccatgtctctaatatccagaacattattcatcaaacgggcaatcgatgctttcatgcccatcttgctcacagagagcacaccacttggactcatcgacgactccggatgacttaccagcaacggcagccatggatgaactcagcccgccgataccttttagtccttccatgaccacatcccgtcctgtctttagtgcggggggagtattggtacggatggacgaggctttggtctggaggggttccgtcttctcaattgggtgttcctcggcaagttcatcggcagcctcatgtttgggattcttctcttcggtgttgttctggccagagccgaacatgctagtgcagttcaggatgtcgtggccacctgtttcgcagatctcgcaccacatggtatcctcgtcggaagaacgctcggattcatgcatggtctccagtcgcgattgagaagagtttgacatactacggtgatgatggaggtccgaaggagcatcctgccagtcggtcgggaccactgtacggtcagagagacgattgctgttgggatcatctaaaggattggggacattgcccgcagagtgcgatggcctgtgttgctttggcgaaagagtgacagtagaactgcggcgacgaccaccagactgcaggtgcatttcttgaagttcacgctcgagctcttggatgcgattgtttttgcgatttgtagtttcttccacctcctgcagtcgaatctccagctgagtaacgtgctctggatcatggtcatgatctgccgagttgttctgtccttcgccgctgggatttcctcgactcagagaatgaataatggccttgagccctcggatctcatcatccttctggtccaactcactactgcttcggggtccgtctgcggcggcatgtgcatctttcaatgcagcggcggagtgatcacgctcctttttcagctccagcttggtgcgttcaacttcaccgcggaggaactcgacttcggccctagcctcggcctctccacgccgggcgtcctcgaggccttcctctaactccgagactagctcttccagctgcttgagctgctgcgcaacaacctcaacatcttcgccgcggtcctgcagttccttgttctgctgtataagctcgtcgagacgctgctcgtagacgcgttctgtttcagaggctgcaatctccaatgtgtcgagggtgcttctgaagtctgcgcggtgaacgtcgaattcggccgttaattggataatccgctcgttacgttcacgtaattgtgtgcggaatgaatgaccttccgatccctccatctcctccaaggtcttctggaactcgcccaaagttccggactgctcgtcgagctgcttatctcggtctagcagctgcttctctagactcttgatctgatccttcaagtcttgaatctccgacgagggcggtcgacggaagtccgacggccgtccatacgacgaagcatcatcatccacactaagtcgcgacgatggtctatcagacagccgagatggagccttgacgggactacgcatgccaccgttcagccccgctctcgatgcagtcgacggtgtacgcaagccggccaggcttagtttcggaggaggcggcacgcgcggagattcgggtcgagggagagagggtcgtcggactcgagggcggggagtagcaagagctgcaccgacagatttgctgaagttgaccggccccccacgtgcaggagtaatcggtgtagagatatttgaggatcgccttgtgacatacttgttgttgttcatgggcacgaatataccagaacccggaatcgaggttgtgaagtacttccggccctcaacatcgccgctgtttttgcctctttgcgcatgctcggcgctcagttcgacacctgcgaatcgtccggccttccccgctaccgatcccaagtatttgatcgtcccatgcatgccaccggggacattcaccacgtcaccgacctgtacatcatcgtgcgccattggggagaaatatggggtgatatgaatatgaggagaatagggtgggatgcggcttttaaataatagccccgggcgaatatcgatagcccctggaagggtttggaagtcagggtgcagagggagtgtttaggagaatgcaaggatatttgacggcccaacttccaccatgacgattgggaaggggaaaaaaggaaataagtggaaaacgacaggcccgattagtcccgatttaattagttagaataagagaaatgaaggtgatcgagaaatccaacgaacgcaacgacaagagaaagggggaagacaacaaataaacgggactccactccacgtaatgccaactgacatcctcaacttccaccatctcctcctcggcatatacaaaccttgcctctgagtctctgcatctccaagacatctttccgacgatcttgtccgttccgtacgaactcctgcgcaactaccacctaccgtgccggacgtcaccggggcccgacatctccacctcctgccctcgcatcatacaccatggcgcaatatttcttcgaccttctatacaacttcacggattgcatgtgttgctttcccagctctccacagctaaagatcaacaaccgaagtttcaagctcctacgtttgttgggcgaggtatggatacccgataacgatagctgcaagctggtctgaactgacaacgcaacagggtggattttcctacgtctacctagtccaagataaagcgagctctgaattattcgcgctgaagaagatccgctgtcccttcggtcaagagtccgtatcgcaagcgctgaaagaagtcgaagcctacaacctcttcaactcccaatccaacatcatccactcgatcgaccactgcgtgtccacagaatccggctcgaaattcagatccgatggcggagatccaggctcgaaaacggtctatatcttactcccatactaccagcgcggtaatctccaggatgctattaatgccaatctggtcaaccataccaagttccccgagaagcggctgatggtcctgatactcggtgttgccgatgcgctgcgctcgatgcatcagtatcgggtgaagaacggcgcggcgtctacgcgaaaggtgaaggctgttcggagagaaggcgaggaggcagacgacgaacggaccatgcagatgaaacccaaacggagggctagccatcgcgttcctgagaatgaggatgaggagaatgagcctctaatggatgatgaggtcacccggagtcaggaaggtgtcgaggatggggacctgcgcccctatgcgcacagagatgtcaagcctggtgagtggccgcacatgcggaaattccgaatcgactcgacgagctaactgtattacaggaaacatcatgatcgacgacaacggccaatctcccatcctgatggatctaggctctttggcacccagccccatcgccattacgtcgcgctcactcgccttggcagtgcaggataccgcagcagaacacagcacgatgccatatcgtgcaccggaactcttcgatgtgaagacagggtcgattattgatactaaggttgatatctggtcgctgggctgcacactctacgcctgtcttgtgggcaagagtcccttcgaggcgcgcagcgaagagaccggtggcagtctgagcatgtgcgttcttggtggtgactggcggttccccgatgagaagtctggcgcttctaagggtaaagctaagtccggcgaaagtgaggatgcgtctaagaatgaggtccctgcgatcagcgcacccgtcaaggatattgttcgcaggtgtctcactgttgaaccctcggaacggcccgacattgacgagcttatcgagctcatgaagagtgtcattgatcagatgcctgaagatgatgcgggcccatctcactgagatctacttggatcttgcttgttttctgttttatctgcgttcttctttttgaccggcaggctccgtgtgggcggtttctttgactgtacattatgaatgcgaattgatttttgtgatatcagggctgttcactgtctactttttgctgttcgaattaccagtgtgtctataagttgcaacccataattctactcgatgtttatcgccatattttttgcttcagtcgtgactctaccatactccgagatggcttcatgatgacgacatgccgagtttgtccacgattcacaccaagcagagatctctcaacccaatccaaaccaaacagaatcgagcacaatgagcagtaccttcgatgaccatacacaggggacggacgtgttgaatctgttcccagaccgggtgaagcacaaaacatgtaccgccacagccccaacccacgcggtataaaaactaatctccaccgcatagttttaatatccggcctcagacgaggtgatctcgccgcaatgaccgcagacgtcctcgcgcacggcggcgcagggaccatcatatacacaggccgctcaaagcacgaactccagcctgtgatcgaccatatcaatcggaaatacaaaacagtcaaaatggtctttgtaactgcagactccggcagcctgacttcgttccgcgaggcagcgcacactatcaagaagctgggcgtgtcgattgatggcttcgttgggttccccgaggtcatggctgtaccgtggtcgctcacggaggacggattcgagtcgcatttccaaaggaattacctgtgttatttcctgctgctgaatctgctgcgtgatgttatggggcccaggtcgagggctgttctggttacgtctagtttgcggaatgaggcgcctgcgcctacgtgggatgatttggggttcgaggtgagtgtgattcttttgtttggattatatgtatacttgctggtgtagaagatgctgatttggatagaatggagaaaattaccattgtctcgatgggtattcgcagtcgatgctcgcgatcatcttgtttatcaagtcttttgcaaagaagcatagtggatctatcgctgccttttctgcaaatccaggaagtgagttattaatgtcgtgaatgtgtttttgattctcattctcattcgatctagataccaaaaccaatgtccaaacatatgttggatgggaggaggtcaaatcctggctgcagcggaagaaagaaggtacgtccagataactaacagatagcgaagaccatttcatttgacaggatttcctttatccagccggcgaagacctaccggttcttttgcaacaagcgccgaagtccctttgtcagggtagtggcgctgtcttgcgcgggttgctcgatccggagcttgaaggtaagataaccatccgacgacaatgtgtctgtactgattggtgggtatgagtatcagcccaatctggagcctttctcgatcattgccagaccccaaaactaccccatctcgacttcccagcaggcgaagagagtgcagaggcgttatggaaacgaagtcaaaaattagttgaaccgtttctttcctgaaaggggagagagacttaggccgaaataggaaggtaatctatgctatcaaagtatcaaaggagtataggattccgagattactctgatatcggactcgacgatgttctttgtattcggatatctgcagtgaaagtgatggctaaagagactatatgccagtctatgccagtctataaatccatacaagcccatagaatccctagaaatccaagatataaaaacagaaaatataagaatccttgccaagaccttctttgcggggaaaagttcttatcttttctcctcgcctcctcttcatcttctaggaatctcaacatgtcgatcttcgatcatatctgtgttatctttatcccttcgattcggctgccttgatttaaactggctctcctccggtaaataatatctcatacttgagcgggcttttttttctcttgaatttaccccattcatatatataggaaggaattgtacttcaccatggcgccagtcatcgacagcacagtcatccctggcaccgtgactctggtagacgtggatcatgtcgtggagacccggcacttggaccacggagaccgtgacattgtattgatcccgaccccgtcaaatgacccagatgatcccctcaattggagtccgagacggaagattctgtcgactgcttgcgtgagcatgtaagtgcaggctatgacctgagccgaggatcaatgttgactttctagctatacgatgttctcaggaattgcctgctcggtcgtttactcggtaattacgccgctgcacgaacaaacaggattacccattagtactctgaacgagggaagcgggtatatgtttttgttggctggctggggtctgctgttctggcagcctttcgctatgcaatatggcaagcggccgacatacatgttgtcgttgatcggaattttggtatgtcattcttaattattttggatatcacttgaacagtatagctaacaaccctagggtatgacgatgtgggggtaagagcaccataatgcccgtgatgagacaagactaacaccaatcagaccatacgcaagcaccaagggccaatggctcgcaagaaacatcgtcttgggtttcttcacagcacccgtagaagcgcttcctcagatctccgtcacggacgtggtaagtaaaaccccatgaggaaatgactcacgcttacacaatatcagtacttcacccacgagcgaggaacatacatgggtctttatgcattcttcctagcaggaagtaactacctagcaccggtcatctgcggctttatcgctcagtaccagggctggcggtgggtattctactacccaagtatcttcgtcggcggtgcccttatcttcctcttctttttctgcgaggaaacaaactatgttcgagcacagcccgacgagcctagcactatcgcggaaaccccaaaactcagctcggaagaccacgaaaaagagaaatctgtggatgttgacatggaagctgccactagggctagtataagttcgggctacaccaagaagtcatatgtgaagaaattggcgctctggggaccgagtcaggagcaaaatacttttttccggcgactctggcagtgtctttactacctgtcctggccggtaatcttctatgccgggtatggatacaacgtttttgattttatatacgttttgactaacatgcacacagcttctcttacggatcctatctggtttacttcaacatcatgaatggaacagcctctatcattcttggtggagagccatataacttcgggttggtcttattattacccgaacaatgaacggagcaagctaacaaatcccagatcttccatggtcggtctgagctatctagcacccatcaccggtgtggtcctggggtaagatcttcgccttggtccgatacttcaacgcaagctgacagtaatagatcttttttcactggccgatttagcgactggcttactgtggaactcgcccgccggaacaatggcgtcatggaggcagagcaccgtctctggcccttcctagcttgtgtggtgcttgtgcctgcttcccttattctatggggggttggtgctgcccatgaggtccattggtttggactaattgctggaatgtgcatgctggccttcacgaatacatgtggcatcacgctcagcgttaattactttattgacagctaccgagagttgagcggcattgccatggctagtgtgattctgattcggaataccatgggctttgcaattggttatgggtaagttttactcttccaattctagcagacaaacactaacttcgtttagtatcacgccttggattgagaacatgggttaccagaactgtttcatctccgctgctttcattggcatggcatgcgcctcagtcttcctcttcatgattaaattcggaaagaccttccgtgaacgttcccgcgagaagtactggaagctggttcaagagaactgggagaagggcatgggcaattagaatagatgcaccgttataatacacgtatacagctcaatagaccaacatttattacacaggagtctgttcctcagcaagatgaatagccccttcatcatcataaacaatctccctcaccttaaccgacctcaaatgatcgatcccctcagaaagctcacagtcatgataaaacaagtaccatttcccctggaactcaacaatcgaatgatgcgtcgtccatccaagcacgggatccagaatgcgtccctgatacgtaaaaggcccccaaggcgagtctcccgtggcataagctaagaaatgtgtatcaccagtcgagtaggagaagtaatacgtcccttgataccgatgcacccaagcggcctcaaagaatctcctctcatgatcatctgccagcaagggctccccggtctccggcgcaaggataacaacctccttcatcgacgacacaagcgaaagcatatcatccctcaacagcgcaacacgcggacaaagcgccctaacaccctcgccagtaggttcctgaggtccagacctactctcatcgaaaacaagtctcttcttccgtccagcaccctccccatcaacacattccccctcccccccatcctcatccttcccctcaacccaacattgcaactgtcctccccaaatcccgccaacatagagatacgcctcgccgcccgcttcttcatcaacgaagacagcaggatcaatgctgtatgtaccctggatataattatcctgcgggatgaacggtccttccggggattgagagacagctacgccaatacggaatattcctttgtggtctcgggccggaaagaataggtagaacttgttattcttcgttgcggcatccggggcccagagttgctttgagacccaaggaatgtctttgtctcggaggacaacgccgtgatcggttacggggctggtgattgtgtccatggagaggacgtggtagtcggccatgtcgtattggtcgccattgtcgttgaaggtgattgttgttttgcggtcgtggctggggtagatgtagagtttgttgttgaagacgtgggcggaggggtcggctgtgtagatgtgggagacgagaggtttgggcatggtagtggtggtggtgatggtgaggttatatagggctaaatgtatagatggaagagctgggtatttaggggattgaaggctattaatatttcattctctactatcctaccatgttactatgctaaattatcccctcattatcccactatcatccccttattagcctatagcttgtctctatactctatacctcttttaaccgacggctaaataaccacggcgcaaagtccgtctcagaaaggaaacccatgcatagcccggattcttcatgttctacattctgtctatattccatttcatcagaaatcaaactcacttcaagttccaccgatgcccctcctcagcatacgctctttgcaacgcctgctgccactcccactccatctggcgtagcacctcatcttcacctccattcatatcttccccattatcactaccactcccatgttcatcatgatcctccatttccgcatcctcctcacaccccatcaacccaaaaaatcgccctaacctccgcaccctcgtagggagatcaatggtcttctcctccgccgtgccaatccacggggtaatatgaacaggataattatatgtggcagggacaggcgggtagacctgatggaaatgacgggcgaggttatcgacctgctccgaggtcagaaggttgtaggctagcatgtttggtgggaagtccgggtgttggaggcctgtttcgcagttgacgaggggccagaggtgggaggagaggtggcgaaggaggggtaggaaatgagggtggaagttagggctttcgcgaaaggtgatgttgggatattcaattgggaagggggattcggtgaggtctagaggtgttatgcttgcggaggacatgctcattgggcttagggtatctgctatggttgtggttgatgtgcagattgagagggttcggtcggagagccagctgatgctgtgaggggagttgggggttgtcgggtcgttttccattttggtgttggtagttgtaacggtggtagtggcagtgttgaaagacaagataaaatacactatgcaaagtatgaagaatgtaaattaaggaaaataaggacacttatatagatgaaatgtatgcgattgtcgaaaacttcaaagaaccaacgacaatgagatgagacgtctcgaaacagcctcttctttataacacaaagacatcgtgagctctccaatcaagccgagtttcacgcacaacccccttctccgctttgtttccaagaaaagaacaataaccatgttcataaatatctgtcatatacgtttcatattcaagttgagtctcccattggcccaaacggccaaatcaaagagaccgttgtcatcacagcgacaaattacccactgcgcgtgacagatcgggctcctctgacacagctggcagacccacgtacttgttaatccagttcaaaacggtccggtgccacatgagcgagttttcagggttcagaacccaatgattctcatcagggaatgtcaggaacgcactatcaatgccgcgcatctggagcacattaaacgcagccaagccctcggcgatagtcagacggtaatccaactcgttgtgaatgatcagatgaggcgtgtcccagttttccgtgagccgcgacggatcccacttcgcccagttctcgggcaccttccagattggccctttcaggtcgtgtagagggaagtattgttcttcactagccatctgtgacgtcatgctaaacactccgtcgtgagtgactaacgccttgaacttgcgaccgagcaggtttccctgcatccagttcatcatgtagccgccatacgaggcacccagtgcaaccgcgcgtgtgacgtcgacgtactctaggtgttgctcgatatagtcgaatcctttgactaggtcctcgtagggccgaccgccccattgtccctggattccgtcggtgaagggctggccgtagcctgtactgcctgttggattgggggttatcacaacataaccttgttcagcgaaaacagcggggttccaacgcgtgctccactgatcgttccacgcgccctggggtccaccgtggatcaaatacgcaagcgggtatttgttcccgggtttgaagtccgacggcttcacaacccacgcatggacagggtggtcttcggctcccttgaaccatatttcatcgacctgagacggagacaagccgaatgctctgccgccccgcccgtttgaggataccagttgaacatcatctgggcgggccgggtcgatgatggtccacaggctgttatctaccaggctgctgctagacacgaacaacttgggtgatttagcagctgctggaacggcatcgttcacgtatcccgatctggtcagtctctttaaagagtcgggcttgattgtgtgcgcattctccaatggcagctggtaaagaactccgcgaccggcctcctcgacatgaataagcagtgacttgtcatcatgagcgaacgatatagctgatggactgagatcccagagtccttcgccgtcgtccgactggaaaatttcgatcatatctccattccacgggttgggaacatacaagatacggttcttatcagactcatagccatcctcgcgcatcgtcagaacggcaatagagctaccgtccgagctaaggacaggagacgacatcgctccctgaagaccagcaaccttgcagattttcggtccggggtcactcatactagtccacgagaacatgggagaataatagcatgagcaagaggtatgagtcgcggggtttaagttaggatctttcgcaataaagacaatagccgacggactaatatcaaagtctgcagtaccaccaaaaggcggaatcggcgactcgacgcctgtcagccccgagaccgcgatcaagtttgtgaggcccgagatggaatatttcccagagcatctacgggccggtgacagaggagcctgttctagcaagccatagaagattgcgttcttctggggctcgacatacgagtcccagtgcctaacaaagagagacgtgtacagttttccggttgtatggggcttcttcgcatcgtggggattgtatagcgatccgtctgtattggccttgcctgtcacggcgaagccgacttttcctggctccagaacgaccaccttcaagtccgataccgggcctgggacagtgcctgcggtgtatgtttcattggcctggcgggcatcgccgacaacaaagcttgtattgccgttgcctttggtctttagccagacaagtttgtcgctgtcgtccacccactgtgggttactggcgccggggtcgttggtgataagggcagagcggccagagctaatatcgataacgcggatttcatttgtcttggcatgagactcgaaggagtaggatgtctgcgtgtagactgctagtgtgccggctgcattgggggtggcagaggaccgcctgggtgctccgagcaggaccctggagtaatcagtgtcagcccaatgcccccaaagacgttcaatggatattgatgtcaaactgtcaagtatctcaagactacttactcgggagtgaacttcatgttccgaatggtcatatcagatcgtatgggagataagataggaagctcgggggagcttccaggatcggattgagcttaaatcgaggtatcaacagggtctaagtatagatgaaaaacgaaaaacacaagttatgtatgctattgatgataccaagacaaacagggtatgagaagaggagagttggagaagagaagatgaggctggggagcaacgtgatcatgcgggggttacggtctggatcgggttaagcgccatgtaccttgcaggcatggcatatactgtgttacatcgaggaagaccaaagtaatatggaaccgattttgtactcttagacttcggaaatttaactattattacaaattgtaaaccagatcatgacatttactcttcctcttcctcgctttcatcttcgtccattccctccgccgcattgacactgaacgtaggagcctgatccacaccaacatagctgtcgctcataagatagagcgtcaactcatggtttccaggtgtagggactacatattccaggcgcagctcgagcttgcgaccgatggtgactcgtttgatagccagcaggctcttggtcttttcatcgccgacaaccaaccaccagttctccatcttctggttggggtagaatggtgcatggacagtagcgtcgggctcctcgtcttcttcgatgtcccgctcgattttgaccttgaggtatgcgggttcgcccgaagtgataccctcggcatcctcaacttcgaagtcaagctcgatgttgggatacttctcattggtgaaagccgcagcttgcgccaattgtttgttgtcaaggccgaggcgcttgaccaaagtagcgtaatccttgttctctgatggatccatggcctccatgaattcgaagatatcattgattctgtacaaagggtcagcaaatgtgtctagagatatttcgaacgatacatacttgtactcattagccaccttgatcacctcattagagaagtggggaatctgcttcagagggctgtcacgatcccacatggcctgaaccaccatctgggacagttccatcgcgttcatcgcgttgagatgaccctcggatgagaggacatccacacaagcgctgagcaggttgaggaccttgcgaacgatgtcttcctggtccttggcaagatcaagagggagctgcatgcgcgagaagtgggcctggaggaggacgaaagccttgaaatgaggagagtcgaaggaaacctctgacatcttgaccggtacacgatcatacacgcgacggagaatgtgattctcatggcgacgcatctggatagactcaaactcggtcgccgatgtcacaatctccaggatacccttgagcttcgttcgagacgagagagacaacaagaatgtttgcattgtgatgaaagagatgttgtagtaagcacagatcatagcagcgttcaaaggcgaaacgctgtcatcttcttcatcaacatcgatgatctttgcctctgacaactccttcaatgtattctccaccagttccgagaggaatgtgctgagtccctcgtggctcacatcgctaaggccgtagaaactggggtttgcaaggagacggcgatagaaataggtgtatgtcatccaatcaaccgcatcctgggtggaggagatggtccttgtgctgacttcagtcacaaaggcatcgtggaggtaaacctgcaggtgactctcgacaggcaaggcctcattcaagaacttcttgtagtagtcgcgcttcactgctggcaccataagaacaccacggccaagcttgtcctgaccgggacgggaggctttgccgaacatctgtaggatatcgctgatggggtagtcgatgtagcgatgttcacgaccatcgaagaattgggtgttcataatgatgaccaagtgagccgtgatatccagttcccagcacacatctctcgaagctaacagcacctgaatcgcaccaatgttaaacaggtgtaagacaatgcgcttgtcagtggcattgagagcttcatggtagtagccaataccgtgagaaagcgatgtggcaagagtttgctcatggacacgttcaagcaaaggcgtaagctcactggcatcggcgttcaggaaacgatcttcatcgttgtcgatagcacacgccgagagaagatccgcagcggtcgcacggacctgcttgcggcttggcacgaagaccagagcaggcttatcgggagagagttgcaaaatcgattggtaggccgggcgagccattgcaagcatggcggatgggaagtgagggatggtgaaagattgaaggtggagctcaagaggaacaggacgggcatgagggctgaagttgtagatggtgtgcttgttggcaccgatccactctccgatatcccgagcattagagagaggcacgctaagaccaacaatgcgcatttcattttcagtctggagagcgatgtagtgcatgcgagacacgatcacttcgtacacgtatccagcatagccaccgagcaagtgtagctcgtcggggatgaacagttgcactgtctggatgttcttacggcgctgccactggcgcgacaacacatcccactgagtaggagtggcgagcacgagatcagcctgttcaagaagtttcaaatcggctgtggtttcgcccgtgagcttgacaatggttttacctccatccagtccaccaagacgcttctgccagtcagctagccggtgatcaacaagctcctggaaaggcgcaatgtaaactgcgcggccgctatcctgtcttgaccagtgacgaagcaaggccaactcagcgcaaacagtctttccacttcctgtgggagcaccgatgaagatattgtcattggtgtcgaatactgacttgaagacctgagactgaatcttgttgaaatgctgccagttggggtacagtgcttcgtagtcctcacgcttcagtgctttgacgggtgcgcgctgcatgtcgagtagaggcgtatggggagggaaacgctcgggaagaaccagcttctggaaggacacggcaatcttcgtctcagaatgcatccatcggtcagacacaagcgatatgaagtagttaggaggcatcgggtcagtgacaggaacagtgaattcgacgagatgctcattcatctcggacttggcaaattcagcacgaagcaagaatcgatcatggaacaagatctcctctccgtcacagtcctctaccaaaatccagaaatcttgagcgttgccatgtatttcgtcatcccagacaaaattgggggtaatggtcaactctacccgcagcatggatcgcgtgatgggctgcacttgagcttgaacatcgagtcgagggaacttggataccaagtcgcacacaacacgtccagccttgggcatgctcagaagctcacccatacggggaggatccaaatcgaaataactgctccaaggcacatcaatgcgctccgccttctgcaagacgtcccttgggcagtgagggaattgacgaaggggggacatagttggccacatgcgcttctcggccattttgcacagatcgagcgcggtcttggccactgaggcccagcctttcttcaggcaaatctcgaaaatcgcgcggatgatacgtccagcagattgagtgacatagaccatgtctgccatcagggccagcccctcaagcttgagcctagagatataagcctgcaaaagaacattgattttggcatgaggttcatcaatcgtctccttgacagggatgggcacccggccgagcagttttcctaactcaagcttctcatcctgacggaccggaatgtatttaaactcatcactcaaggcaaagattcggaataattcaatgtttgtaatagagggctggaggtgttgggagtaggtcagcattgagttgtgaccaatatagtagtgcgaagagatacgtccaagctcagtcgactgcagacgcccagtcttcttatcatacttcacgagaccggccttctcaagtaccacagcagcggagtgaataagatcaactcgcttttgctctagtgcatcatcgttctgataatcggcgccaacactgtacaggccaggtgatcggagcatccgaacgtaaaggtatgtgtagcctagccaatccacaccttcatcgcgggtacggacattgccaagtacaatctcagcattgagattgtccgccagtttgctcatcagctgcgactcaattggaagctgttggttcaagagcgagaggtagtattgaagttcagcttgcgatgtgatgatgataccctcaccgaaggtatcatattgtggtcgaccagctcgtcccaacatctgcagaacgtcttgcgggctcaactcgacccaggcacccttctcgggggagtagacctgagttcccttgatgatgacggtgtgggcgggaaggttgacaccccaggctagtgttgcggtacaaacgaggacttggatgcttccatcggcgaaaagagcttggacggaatcacgatcggcaagactcagaccagcatggtgaataccgagaccgtacggcatgagatccttcaggttagcatcgtccacagagtctgcttcttcggagagaatggcacgactagcagcgtcactgcgcagaatctgaccaatggtttcattctcaagagccttgtctctgatgtacttggcggtcttggcagtctcctttcgagagtggacgaagatgagcatttggtttcgttgttgcccgacctgctccataaccttggtataacagatgtcgttcatcgtcttcaactgtttgatggccttcttttcggtgacaccgatgaattcctgcttgagggggcaaggacggtagctgccgtcgaaatggaacgtgcccttgacaggatctgcgcgcaggaaacttcccacatcacggtagttgggaagcgtagcactgagacccacaattcgtacaggctctccagtctgctcggttttgcgaatcgttcggctaacgatgctctcgaggacggggccacgttcatcgtggagaagatgaatctcgtcgatgacaataaggcggacaaggttggtgtagctagtttcagttgcctttctggtgatgacgtcgtacttctcgggggtggtgacaatgatctgggtatcggcgatttgctgcttggtgagctgacgatcacctgtgagctcggacactcggataccataaggttccaagcgcttgccaaggttgccgacttgttcctgaaccaaagccttcaagggagagatgtatacaattttgaagtcatccagcatgatctctcctgtttcagggttgcgattcttcccgatttctcgaaggatcgcgagcatagcaacgttggtctttccggaacccgtgggagcacaaacaagcaggtttccatcgtcaaggaaagctgagggatagcaccttgtctgcacacggttgagttcttttgaggttccaaatccaacacgggcccattccggcagctcagtggtcgggatattcttctctccagcctccttcttagccttaggtggtggcacatggatctcttcgtaccccttgaatcctcgcttggttgagccctggggaagcttgacattggcattggtcataagatgattgccttgatggaagaccaaattttccaaattgattgttctcttgggctggagaatgccagcctcgccaccttcggctgttttgtaatcggtagttggacccgaaggaacatcgacatccatcaagtcgaacttcatcttcttacctggtggtgctccaagttcgtcaccggtttctttgccacggatttcatcgaggatggcacgttgaccggcttcgaccatctcaatctccacgagattgcgcgcagaaggatcctctgcgactcttctccagcgagtaacccagacggccttgtcacgattggtaactagtttggcgacaagatcgggatggtcatagtcgaagagttccatgaggtcgttctcaacatcgcgcaggggtttcaatgttccatcctcgtccttcccaccgaggatttcaagtgcttcatctgttttctcatgttgaatgtgagcatctgtgtatatcgcaccgatttgacgttgcagccagtaagcgtcaatttcgcgagcggagacgttcaatccggtcttttctgtggctttatcacttcggccgagacctccatcgatgaccatttcatctccgtcttcgtcttgggctgctgcagcatcgtcgattgcgagtcgttcctgttcatcctcctcttcttcgtcactgagctcgtcctcgtctcgaacctcgtctacggttcccatgcgctcatcgtcttcatcttcatcgaaaacgacggcaacaccttggcgttcatcaagttcgccaccctcttcctcgagaccgccttccacctcttcctcttcgtcttgggcatcgtaatctgtaatttttttgccgaggttcaccagctcgttgaactccttggggttcattgaggtacccagaagatcatcaatctccttctttttatcaaaatccttcatatcttcgtccttcagtagttccaaaactgcatcggcagcacttcgaacgacttcatgcggaacatcgcccagctggcttccagtgattgtgagaataaggtcatacgtggctcgtgtggcgggtgtgcggggacgatatttcaatccttcgacgaaggcatcggcggctgaaaggatgccctggcctcgaagttgtgctggttggccgcggtggcgctttttctgttcgcgtagaagcacatcttcaccctcgccgattgcaccccgctcaagacctgtcggggctgcctttttagatttgggcgcgtcttcacgcgcgactcgtccacccatctcccgaatcccaatgcgacccgctagagactccgggtctccagtgggttcgtcatgggtgcgagtgataaaacgacgatccgcctggagaaccaggttggacatcgccgagtacttatactgtgagatatcttggtccgccatcttgttggttgtatggctgaatcaagggaaaaaggatgaaagaaagagtgagttgcgacaagaacctgcctgcggagggtcaagattcaggccgcgccaagacacgagatgtcggcgattgatcaattttaaatggtctcacaaacctggctcatcctcctgccgcaagtaatatcacttgtaagggagaaatatcagccaaggttgtagctagtagatctcaaggagagtgcagctcgggaagatttcggtggcgaaggcggaagaggggagcttgaatggttctgccactcgaaacggttcgggggcgcgtcgcaacaatgcgcgccggtctctctcgtcgtttaatgccagtttatatgaggcctctggcgactttgatacgttcatctgatcgttgtaacattcaccggaccatatgtcaccatgcacgtcgaacctccatacaccaacgcgtgtacaccgccgcatcgaaagtccacaaacaaggcgcaaaaactaaagcgacagtaaagttgaaagaccttcctcaaggagttttgaaactcgaggcatacgatgatcaggtggatgaggctcctcgttacccgactgtggtgcaggggcaccgaaacaatatgcaaacgttcaagaattgtgttatcttgacccgggtcgggggcttctatgaggtacgataataggcaccacatggctagagagctccatgctgagagtgtgttctgtagctctattttgaacaagcagaggagctggcaccattgctcaatctcaagctcgcgaccaaaaagaccaacggcgggccggttccgatggctggctttccctttttccagcttgatcgtttcctcaaaaccctcgtcggagatctcaacaagtatgtggctattagcgaagagttttccattaatgcagaagacaaggcacgcacgagcggcctcctctttgatcggaaagttgctaggatcatcacacctggcacgctgattgacgagaaattcattgaccctaccgagcataattttttattggccatatacttggatgtgccgtctttgaaaatccaattgaagcagcacgctgacaaggatctccaatcatcgtatcagcatatcctagcctctgtgccccaacaagtaggattgtcatggcttgacctctcaactggtgatttctttactcagctcacaacgagtcaaatgcttccgtctgcgattgcacggattggagctcgtgagattttggtagatcagaatgtgcaagatcttattggacatgaattgcaattgctcgttggacacgatcatcgccttgtcaccttcttccaataccctggagaattcaaaccggtatctgaatgggggacaatgttagagtctcccgttcctgaagaaactcacgcctccttcacaccagaggaagtagcagctgggtacagcctgcttgagtacattcgcgtgcagttgcaaggatcgaatctcaagcttcagcctccaattcgaagacatttgaatgaatcaatgggcattgatcgtaacagtctgagtggtctcgagattttagaaacagccagagacggttttgggaaaggaagtctccttcacgctgtgcgaaggacttctacaaaaagtggtgcacggcttctacgagaccggctaagtatgcccaactaagagtcaaaagcttttgtatagctttgctaatgcattacatacagcctccccatctacatccttacgagtcatcaatgagcgtttggaccttgtctcggtcttcatagaaaatgtcgagctccgtgacagcgtcatccaacttttgaaacgcagccatgattctcaacgcctagttcagaaattcgcatttgggaaaggggacccggatgacttgatttgtctttcccgcgccattgaggcttctaaggaagtcagacaagttcttctagatcacaatagactttcggtctcatccaatacttcagatctgaatcacagtcttactatcatgatttcacggctttttctcgatggtcccattgcgctggcggatcaaattcttgcagccattgacgaagaaggcttgttacaaaaacaacgcatcgaggatagtactgccgcagaggcagccaatctggcacaaaaggtcactatggatgaagccacctccagcgagctcgaagcgctgccgaaaaaggtcagagcaaagaagggcgagcgaacagttatggctgatacggactccggtcctatcgatacctggattatgagacgtgacgctagtaagactttgaatacactccacggggacttggaacgattgggcgatgaaaagacttcattgactcaacgtctccgtgattcagttgattcgtcagccctgagccttaaatggaccccagggttgggccacatttgccacgttaaagggccaaagatatcccagaaatccctagaagacttgggggtcactcgaaatgtctcatcgaccaaatctacccggtcattctatttaccagcatggacagagctaggagtaaaaatggaccacgtcaaggtccggatccgtcaagaggagcaaacgatctttgaacgtctgcgccgcgaggtgatcctgaaccttgtcaaaatccgccgaaacgcagcagtcatggatgagctggacgtggcgtgttcatttgcaactctcgcccaggaacaacaaatggtacggccgattctcaatgacggtacctgtcacaatattgtcggtggacgacatcccacggtcaaactggggttggaggaacaagggcgatcgttcgtgagcaatgattgcttcttgggtgattctgagcggatctggctcattactggccccaatatggcaggtaaaagtaccttcttgcgacaaaacgccctaatcacaatcctcgcccaaatcggatcttttgtacccgcagcttatgccgagatcggtatcgtggatcagatcttcagccgaattggtgcagcggatgacctcttccgtgaccagtcgacgttcatggtggagatgttggaaactgctactattcttaaacaagccacgcccaagtcatttgtgattatggatgaggtgggccgaggcacaacgcccgaagacggtacagctgttagctttgcatgcctacatcatttacactatcataaccagtctcgggtgctttttgctactcatttccatgcccttgcggatatgacggaggactttgccaaattggcgagatactgcacggatgtgaaaactacggcttcgggtgccttctctttcgtccaccgactgcggaaaggcgtcaatcgccagtctcatgctctgaaggttgcccaactggctggtttgcctaaagagaccctcgagcttgctatgcgggtccgccaggaaatgaaggatgaaattccaccatctcgagttgctgatggggatgaaccctagcatcagcgtgctggaggcgaaatgttgtggctaatgtgtatcacttgaaggtactatgtaagatatttatgtacaattttcggcttctcctgttaaagatcccactaagtcagaaagcaaggttggcaaatgcctcactcgcatctttttttttcaatccaactgtcggagtcttcgctttcaccctaggaacccaaattttgcgattgtttcgtagacgttcattcacacatcaaagcttaggtgaccacaacctcggacccttctcaatccgaccgtgttgaccctcgcgaccaagatcaacaacaagaccctccttaaacgcaacctcctggcaatcctcacccccaaccccattaacaaactgcacaacaacgaaatcaatcctcctatgacccaaaactaccataggggcatgccacgtgccaacaccataagtcacagcctgaccaccacgcgccacaaacgccttaatattattcagatccggcgggtcacgaatggtgaccgtctcgccggcctcattctccgcggtagcagtcctccactttagagtgggggcaaccactatcaaaaacaacggttcttcctcatcatccccgaccttggaatgggcggataaatcgaccgggatgaaagtttgattagtaaacgggtggcgctcaaggatccgcacgtcaaagacctcccggtctggcatctgggggccgccgctgacagtgcgcaaaacgcgcgggaagcagcaaaacatggtcatgcgtgcctcggagggctgcccgcttggacataaattggtgtatcggtcgatgagcggggagatgggactgtatttgagagcggagttttggttcgccagtaccggggttgggttatgtggcggtaggcatgatgattcaggggcgatatttagttctctcggtaatggggagaccactgctgtaccgaacggtgcgaaattctcctctgtcagaggctccggagtgagtgtgactgtcgggttggatgtgaggaccgacaccatagtgagattttaggtgtaggtgtgtgtggatatgtgtgttggtcaatcgcttcgtgttcgccacttgctagcgtgcaggtctacagcttcatgagagagaaaaagaaaggaaattggattggatgtggtttatgaagctaatgtcggcggcgtcctccggtgataagataagcggccgagaccgttttttggatatattttggattcattttcatacaacttggagaatactactcggagaactatataaaaaggctgtttgtaaccattctattttgattcttttgctttttatgttagttcaagtcgcaagctcttcatggtgtattgccacttagctcgagcccgttcaagcgtgataaaatacaccaatttcttttgcaaaattaaacaaagtctctacacataaaaggagctaattcaaaagacatcgtggcattgaagtctgtgcagaggacccttgggattttacgacaattttctcgtacccagataggcatacataggtaatacacagtacatgggagtcaccttatgatatgcatgcatacattagatctatcaatgtcggtgtaagagccctatatgcatttcgatgtacaatcatgtactctgcaaccctggagtacttgaccggttattacaggtagatctaaaagacaacaggatctttcgggatatacgcggaatgacgacgataatagctattggcttactataggtccgttgctccgggactaataggcaatatagaactgcatgaggctcacacagcggtgactcaattctcgttgtcttgctcttggtcaatgctataggaaatacttagatataaagcattcctcctgagagctcggctcattctatcctccttctgatattcaaaggaacctactcgtgcttcgactctacttaggatagagtattctaagcggcaaagaaatatttccagtgcaatatatatcaaacgcaacaatgaattcttccaatcaatcttctccccagcaaccatctacccccaatacaggcagttcaactgctgccgctggaagctcatctacccctccaacaagctctacctatacatatacagagaaaccattgaggtaagacaaatatttgctatctcgcctatactaaagtgctaatacggacccgacaactcaaatagtgacgccgaaaatttccaacgaaacacagaccacatgggtggttggatcaaggacctcgaccacccggatcaattgacattgtctaactgagtaggcaaacaattccactcagctttaactccacgaacatgtcaacaatacggctatttgataggtctgagaatgatacgtgcaagagctggttcgtgcctgaaggattgtcgatgaatccactcatgcattcaaattccgaacacgcccgaaattgacaatcttattcttcttatgacgcctattcggagaaatggcgcactattgcatgtatatttggagtgggagacctctgggactgatacgaacatataacgtggttttctattctctatcctctattttctattttcttttatctttgtctttgtcctttctttggacgacaaacatgtgataggacaaaaattgagggggagagtgactagggtatgcagccactaatcgtcttgcatggtatgccagcgaattggtagatggcaacatttccgagatattcgacgccatgagaacggaggtcaacaccgaataaggaatatgatgttttagccgagcatggacattatgtgttgtctttgatgtgtttcccctctttttttcctatctcgggcaattagcctccgtattcgttattaaaatgttaatattatgcgtggtgctagtggtgctagtgatgcgggtcaccaacttatttgatttggggtggaatcatttaaacgtgcatataaatgtaacatcaagttatatgcttgatgcagtcgtgcccaaagtaagcttgtgggattttagcgtcctaatggagtcagatacagcaaggatggcatagccaagctgctagtttgccgctcactctgctaggactggaaaaagcccctagcacgtatgaagctctatccccgagccactttatgtgtaaagtataatcatttccacactctgccaaactcatacctacatgcagttatagttaaccagtagcagcttgagggaaaagcatgctcggggtaaacaactgagaacttcaccttccgggggcctcgaatccttctacaagagtgatctatgagctaacgacttggtatcgacacctctctctccgatagaacaagaaaatacgtctttggatagaaacccgatgacgggtattgattgatcaaaacgggcagactatggaatgaaaggcctggatgatccttagttagacaatcatatattcgcttctggctttccattcccctgcagggaatcaagtcttcgctttcgcatcccatgtaagtccattcagcgagcaataaattcgatctgctcgccttttaccgtcaccgccgaaaggattcattttattggaacataaacccgagcgatggcaatcgctaatcgtttcccattgcttgatcatagtatagatgatggcagggctggactcccggatatcgacggtgactgatagagccggaccagactcaaataagtgggccgtatcgatcaagcaagatatcttccttctgatcaatttaccgagtgtgaggcctaggtgtgctgcatcgcaactctcagaacactgagctggacctttcagcagtcttgaaatgtgttctttgatcattaattcgaatttttcgatgcctttctgtctacattgatcaattttgtctagaagtgcacgattagtgatttttcacataaatctcatctcaaataaatgcaacgttctattttgttcacatgcctttgatggaatttggaatcgggagattgcttgtgtcaaatggccctgttgcttgctgtatggcaatttttgttgttttctggaagatcacagagtgggaccggaagacacaggagatcatcatccatattttcatgtcttgtgaaaatgaagacggaacaagcgactccagggcttgtatccagattccagcaaacacttcgaccacctcgttgcattgaaaaaaatcagttgccacggcgatatcactcaattgtggtagggtcagcttcaggggaacttgtcgtgaacgtccatggatgaggttcaaaaggaccagaaggatatctggtttgcagtcgttgacgggaatctcaacggatcccttctttgaaagagcactcccttcagcccaacaatctttcagcagtcgcttgaaataagccgatgctagtgctaggtgcttcgatgagacttggaagcgagcgtagtttcccggcacattgcctttgctgatgtcaatcaggggggtttttggtgtgaagagaataatatctccatccggatcaacctgatagggcggatgcaagtcaggtgccactacagcagtcaatatgggtttagtgtcctcctgttcttgagtcgaagccatgggtgtagccgatgttgactttctcaaattcaagccacgcagtgattttgtttggcgcggtgccattacggctgtaggtatgttgagggatattcaacttggccaaccttcaacagagagaagagaatggggagcgagacagagaaaataaacgcgtatttatgttgttgtcggaaatgaagcgtaagcaaaatcaaaagggtcaattgtggatcatttgcatatctacagtgaagtacagagacacgttggacacattctattcctgtacgatataatgaagggtgatcaaaagtacctggttttaggcatacagagatatgttgactttccaaatattctgcaaaaaggctatacaagtgttgcccaaatgcatgggagggggtctttactctttgtatagcaggagacccaagaactagtctctttgtatagcgctccgcctataaatatgtttattgaaggaaagggcagttcagggtcaataatagacctcaggtacaatttttacatgctagcgtgagttgatcatgacagtaattccaaagcctaagctttggatcatcagtagcgcttagcacctgtgtttttgtaagagtcgactagtaaaattcaaaaggatgtgtcttggtggcttggtaagggatactcaaatgataaatccattcatatatgcccattccaactatgctatacgtggaggatgtaaataagttccgagagctaccgtagtaacggcaccattgtgatgatgacaaagcttcacatttgggagtgaagggtaacagtgatgaagacaccgcatcagaaatactctttagacaagagaatatctctgggtaacatattgtttggctctgcagcggcgcgtacatcatcgtggtgtattgagtagcgattgagtcacagcgcttgctccaaaaagtctcaactagaacaccaggggggtgtttcgagcagtttggctcacaacttatgatactcgctaatggtaagccatagtatatcaattcctgccttctggtgacagaggaacggacttccatggcagggaaagtttaaagacgccgtagcaagtttaaatcaagtagcattctctccttttgcgtcaaattttgctttcttggctcgtcgtttgatttctcttttggacaaaggcttgtcagcatcctcgccgacaggctcagaactgatagaagccttcctcttgagattgtccactccattttctggctgcacaggttctttggctttggggttattcttttgctttggcgtgaaaccttcaggtttgactttctccccaccattgacgatatccacgatgcctcgccaactggttcgcttcaacttagccaacgcggtcacttttcgcgactcttcgcagactgcttcctttccacgctcttgtgatagaccccaaacacaggcaagatttatcacgtcccacggggctcgtagacctaaagctcgtcttgcttcgctagacacaatgatgcctcgaccgcgtgtcgcgcggatcaaggatgttgcattcccaatgaggttccttcgggcgtcaagtccactccccgtgatccctggcccatagcagatctcgatgcgaactccacgtgagattgccgcagacagcatcttgaatttgaagtggtatgggagtcgcaccgagagatccacagagatcacgtcgcattccaagttggtgcatgcattcagaagtgacttttcattcgtgggacggagagcaacgatgtcgtacgcttgactcagcgcgtttaggcgctgattctgcgcaggatcggccagagtcaggttcaaccgggtcagcagttggagggatttcggcgcgtttgttggaagcggaggtggagcgaggcttggggggagcttcccgttgattgtttgagatagggctacggtagtgtaaccaactaaacagtcaggtcagtccctcatgtgctccaacctacggatcttgtgccgcagagcggaatgaatgacttacgctcggcaaggaaattcagagtatggggcacctccgggtcatcggggctgtaaggtacattcaggtcgtaaaacatggtgaatttaaaggaaggtcagccctgcccgtggaagttattgctttacttctcagcgctcttggtcacgtcgaactgtcccaaaaaggcaattagaaaatctatcggattaacagaggatccgtcagtgcactaactgctttaggtcgggtccccacaaacctctctgatcccgtgacctcaggcggaaccgatctcgttctactgatcatatcacgacaatatctcacttcgtccatcccattgctcaaggcttcttgtgagcactgtgtttgggctgaatagtcgctgggcctgttgctacctgtctcctacgtctacctaatccccgaccccttcctccgtcgcacggccgagcccctcgtgaccccgccgcacatctttcaattgtggccgcactcggaaaccgcctgtcatcgtcaagatggcgcgtgtctatgccgatgtcaacgagcatatgcctcggtcctactgggattatgatagtgtcaacatctcttggggtgtccttgaaaattatgaaatcgttcgcaagataggtgagagatgatgaaacctgtccttctgcagcatgtcggagatggttgccgctgtgagctgcgggtgaaatttgagaacaagctttctgactttctactttaggtcggggaaagtactccgaggttttcgagggtatcaacgtcgtcaactaccaaaaatgcgttatcaaggtcctcaagcccgtcaagaagaagaagatcaaacgtgagatcaagattttgcagaatctcgcgggtgggcccaatgtcgtggcattgctggacgttgttcgcgataaccagagcaagactcctagtctagtgttcgaagctatcaacaacaccgacttccgcacactgtaccctcgcttttccgattacgatgttcgcttctacgttttcgagctgcttaaggcgttagacttctgccacagcaagggcattatgcatcgggatgtgaagccccacaatgtcatgattgatcatgagaagcgcaaggttagtgggcttatcaaatagttgtggcggaaatcatggatctaacatgttatagcttcgtctgattgattggggtctggctgagttctaccacaagggcacggaatataacgtccgtgttgcgtctcggtatttcaagggccccgagctgctagttgatttccaggaatacgactattctttggatatgtggtccctaggggctatgttcgcatccatgatcttccgtaaggagcctttcttccacggaggcagcaatacggaccagttggtcaagattgccaaggtccttggtactgaagagctgtttgagtacttggacaagtacgacattgaactggacccgcaatacgacgacatcctctcccgtttccctcggaagccatggcactcatttgtcaacgcagagaaccagcgtttcatcagtgacgaggccattgacttccttgacaagcttctgcgctacgatcatgctgtacgttgtgattaacatctctataaatgttctatgctgacttctcaaaggaccgcttgactgctcaagaggcaatggcacacgcatattttgatcctgtgcgtgctgatgcagctgcccttagccacaacaatgtgacactcccctgaattcctctcgcatgaactgttcatgatcatggttctgatccttttactgcgatgcccggcttccaagttctccgcatgctgccatcaagattttgtcgggcatcacaataattacgtacctcttacatttgaaatttgctgatatgaacggcacaacgatgatcgaaaacatgaaatggcttgatcttcgtacttcctgttcctcttctcactggccgttcgatgatggactgcggcaaacgatcaaatcctgaatgaagacgactttgatgacaagacatcatgacatttaatttgctggttccctccaagcctcttatcgcctaggtcgtttggcgtgtcaatgagcgtgataaaccaacgtcttagatggggcaatcgctcttctttttcatcttttcctatttgtatagcgctcgtgggtctccctaattgatttctcccttgttagttaaattggtgttttggcctttgttttgggtgcttcgtgtttcaagggatgctttttcctaagacaacccattgcattttcttaatgtttccctttttatgaatgaaacattagacgagataaaaaagaagtttcaagagaccctagaattgcaatttgtatggattgaacatcgtaggtagggttctatgtatcacgcgtataatatggctcgacccatgtatagaatgacatggtataactatctagactcagaccatgaaacagatatcaagtatgaataacctccaattcagtaaataatcccaatcttcctcttccaatccggttcttatagatgtagcctcagatcacccgttggctccagcgtatcacgtgaggattatcgcaatgtcgtcctggccgaacaaatacaagaaaagacgaattgtaacaaagaacacgcgaagaaaggaacgtaagatacccaataatacccaatgagtgttgactcatataaacacgcttcattgacctgcccgccgactccaccgaacctcccaccaagccccgcgctctcattcgttcattcagcgttggaaatttaattgcccgcatttcgcacaacctcccctccttatacctctccatctctcaagatacttatccggcgattcgtggcgcgatcggcgccttggagatttactcctcaatatcgtgcattctccaggatggctcaaaactctgcctcccaaacccccagtgagtttcatgactcattctcagatgtcgcagaagcttatagtgaatagcgggtgagcctacggctccaacccctcaggtcgacgaacagactcgcgccgagttcgccgatgttgccgcaaaggccccccagaatccgcagggcggaccggccggcgctcccaaggtgaagaccgagaaagagtgtatgttaccaccaagatctatattcggacctttcctcggaagtcgtttttgtataatgagtatttgctgatactgtgggtgattcctagtggaaaaggaacgcaagaaggccgaaaagaacaagaagttcgaagagaggcaggcggccaaggccaaggctgccgccagcaaggccgcagctcctaaagtcgagaagaaggtgaaacccgagaaggacaagaccgccgatgcctacgatcccatttccatcgaagccggtcgtctcgaatggtgggaggagcgtgatctcttcaagcccgaattcggacctgatggcaaggttaagccggaaggctccttcgtcatccccattccccctcccaatgttaccggttctcttcacatgggccatgcccttaccaacgccctccaggacaccatgatccggtggcaaagaatgaagggcaagactaccctgtggcttcccggaatggaccacgccggtatctcgactcagagcgtcgtcgagaagatgttgtggaaaaaggaaaagaagacccgtcacgatattggccgagaggccatggtcaacttgatctgggattggaaagatgaataccacaagaacatcaagaacgccctgcgcagacttggtggttcgttcgactggagccgtgaggccttcaccatggaccccaacctgtcagctgctgtgaccgagaccttcgttcgcctccacgaggagggtattatctaccgtgccaaccgcctggtcaactggtgtgtggctctgaacacctctttgtctaaccttgaggttgagaacaaggaaatcgagggccgcacacttctcgatgtgcctggctacgacaagaaggtcgaattcggtgttctgactcacttctgctacgaggttgatggaactaccgagcgtatcgagattgctactactcgtcctgagaccatggttggtgataccggtattgccgtccaccccgacgacaagcgctaccagcatttgatcggcaaaaacgctcgccatcctttcttggaccgtctgatccctatctttgctgacaccgatgtcgaccccgaattcggtactggtgccgtcaagatcacccccgcccacgactttaacgatttcaaccgtggtaaggcccacaacctggagttcatctctgtcatgaacgacgatggtaccttcaacaagaatgctggtccctttgccggcatgaagcgctttgatgcccgttacaaggtcatcgaagaccttaaggagaagggtctgtacgtcaagtgggagcacaatcccatgaaagtgcctcgttgcgccaagtccaacgatgttattgagcctatcatgaagccgcaatggtggatgaagatggaaagcctggttcagcctgccattgatgccgttgagaatggcgatatcgttatccgccccgagtccgctgagaagagctacttccgctggatgcgaaacctcaacgattggtgtctgtcccgtcagctctggtggggacaccaggctcctgcttacttcgtcaagattgaaggcgaggatggcgatgacagtgacggtaacctctgggtcactggccgtaccgaggaggatgcttgcaaaaaggccgaggagaagttccccggcaagaagttttctctggtccgtgatcccgatgttctcgacacttggttctcttctggcttgtggcccttctctactctgggctggccccgccagactcacgacttcgagaacctataccccacctccgttctggagactggttgggatattctcttcttctgggttgcccgtatgatcatgctgggtattaagatgactggtcaggttcctttccgtgaggtttactgccactctctcatcagagattccgatggccgcaagatgtccaagtctctgggcaacgttatcgatcctctggatgttatggagggtattcagctgcagactcttcacgacaagctgcagttgggcaacattgccgataaggagattgctgctgctaccagataccagaagaaggcattccccaagggtatccccgagtgtggcgccgatgctctccgcttcgcccttgtctcttacaccaccggtggtaggtttcatctcatgtccttgtttgattccatttactaatcatgatttgcaggaggtgatattgctttcgatatccaggtcattcacggctaccgtaagttctgtaacaagatctaccaggctaccaagttcgtcctcggcaagcttggcgatgacttcaagccccaggctggtgttaagaagactggccatgaatccctttccgagcgctggattctgcacaagttcaacatcgccgccaaggagatgaacgaggtccttgagcagcgtgatttctccaactccgctcagatctcctatcagtactggtactcccagctgtgtgatgtgttcatcgagaactctaagtacttgctggcggatgatgcctcggctgaaaccaaggagtctgccaagcagaccctctacacggcccttgagggtggcctgaccttgatacaccccatcatgccgttcgtcaccgagcacctgtggcagcgtctaccccgccgcgaaggtgataagaccatctcgatcatgaaggccaagtatcccgagtacatcgccgaattcgacgatccggccgccgccgatgcctacgagctcattctcaacacctccaaggccatccgctcgatcctgtctcagtacgacgtcaagacccagggtgatattatcatccagacctacaacactaccagcgaaaagaccgtgtctggggagatgaccaccatcaagtctctgggtggtaagaccctcggcgagctgtctcaccttggcccggagaacaagaaccctccctctggctgcgtggtggctgctgtcggctctgatgccgctgtctacctccgtgtctccaaggaggttgcgctagagcaggaagagaaggctaaggctagcctggccaaggcccgtgagactgttcgcaggtctcagggtattatcaacggcgctggctggaaggagaaggtcaaggccgaggtccgtgagcaggaggagaagcgtctgcgtgatgctgagggcgaggctgcccgtctcgaggagcaggttaaggagtttgagaagttgcgtctggagtaaattgtccatcattgggtagagttaaacaaaatacatcaatttattcccctctttcaaccgtgcattcactgttaagtcgtatcccagttaatcagtaattacccatgtaaggttccaacagtaacctgcactccggctcgcccagaaccggtgcagccgatgcgatgtgcatctgatttatatatgatatacgagtcattaatcactttcattcgacagcatccgatgttgtcattactattcctattgcgaattcgggatgttttctgcagtccgtagagatgcgctatacgaagagattatcaaacttcgattttctattacaataatattagcatctttgcaatatctcatttcattgcagtccatttatgtagtatatctgtttcattggtactttttccaatacatccatgtggagatatatattattggatggtatagcaagattatacagcgtggacaatatcaaatatacgcgattgatcttaggagaggaaggttatagttctgcatactaaaaacaaaagaacttcctatattcgatataagattcaataaaaagacttacctctgctaaacatttaaatagcaaaaagaccaaaaatagtttccctgggaatcgaacccagaacctttccggaacatcagcgaatcgcatttgttaacggaaaatcataaccgctagaccaggaaactgctcgaccactggggccaattgatgaatggacaggccattattggcctcatgagtctacaactttgttcccaattatttaggtccggagtaacagaacgaacttgtttcgccaaccttccaacattcgaaagtgggcaatactcaatccacagcggcgagactctcaatggttcttaatacaacggagtattctgctctgcataggaaccatctagacccaatatgaatcgaggatacattttcacttatgaataccgtatgctgccgagcgcatattcgaagctcaaaactacagtaacctgaagcttaggagtatttaccaggtcttgaaactacagtctaccccttgtggcttagatatatgtggctgaacccgggtaaccctatgtcaatacctagtcggccattgcctatttaggtaacaaaaaaatgactacggagtatgccattcgctatattccgcgtatctatggcttatcaaggagaaactaacagactgtgttcgaggtcacatgacctctccgctctcccaacaaccatttagtcccagcagacctccccacgcaactcaagagattttctagaccacctacgttttcatccgtagtactctagattcaatctctcacacctacgttgtcgtaaagcaaacagccgatggaagactgaaaagcaaggtacaagtgccaaacactttcttcatcgtgcgttcttattccccctccctttgctcttctattctcttctttttacttagtatctcttgcattattacatacatgagtatataaattcggcgaccaaaacggtgtccatctactcaaagagcctggggattttgctcaggtgatctgatgactggacaagagaggtgttctgggatgaagatgtgttgtgtgacgctgccgacgtggcctcctgatgagactgtctaggttcaggacctgggtcgtgtgtacaagttgatggattcctgaatgggagaggaaagaaggccgtgtgggagatttcaatacgcacttcccacaattgcgagaatggaaatgaagacatcaaacttatgcgttagatgtgattgagaaagcaatatcaacgatttttactattgcagtgcctaggccaaacctgcaaacattaatattagataactgatttatgtttctgatctcttcgaactcggcgacttcaatctagctttggtaggaactatgaaataagaaatcagttgcaaataggagaaagtaagggcattagtcaggtatatcaactcacgtccaacctttctatttctttcctcgttgctgagtagaagacatacggttgacaaaacgaatagcagatgtatatagggattagatctaggagatgcggcttagagatttctctgtagcctccggccaagaactcttccaagtccgtccgggcaaccccaaaaaggggaagtaagactggaaagtaaataaatgaacgactgcggtaaagttctgagagaaccaaattactcaaaaagcaaaaacatacaacagtgaggattcgctggtggtcacccacccaactactaactcaccggcgtgtggcttgagtacggctgagcggacgggaagccctattttccacaccctatggtcgtatgtatttggtatagcactggagggaagtatataatagctgataactatagactatagccgtgggtggatataacacggcttatatctcatcgttaccattgggtcaggtgacctctacgcctatatggtcatagcgttggatagatacgttaagtgctctcatgtctcgttaagcttcatttccaaaaagttactccatactccgtatattatatagagttctacaacggggcctaagatgaccatggtattgctatacttcattcacactgataaaacaaaagcaaaaaacatacaacagtgaggattcgctggtggtcacccacccaactactaactcaccggcgtgtggcttaagtacggctgagcggacgggaagccctgttttccacaccctatggtcgtatgtgcttgatacgacaacagaggggaacatagagtaatgaagtacaacttcgtaggtggtgaggggtgaggatggatgagaaggatgagtgcacaatgatggggtgagaagaggatcgatcaccctcgggcgaccgccctacccccccttccagctgaattgccgcgcctcaaccaagtcgagaattttagaaaactcctatgtgcttcgcttggtctaggtccttgaagtctggaggtgcttaaatgtgaggacgtagtcgattgcatcaagcaactgcaaaaagcagttgtagtttctgcagctgatcttttgcccgcacagccgcgaatttccggtcccattcagcgcattgctcgtcctcgatggtttgcgcagccgtccccttggctcctggaagtgtagagatacggtctgcctcttcgccgtggcgaccaagttccagataccgtaaatcggctagagaagaggaggttacattcactaggagagaatagtcagataggaaaatctgttattgtggacagtggacatcgtaccttgcgttcggttctttctcttatcaatatcaatggcaaaaaaaaatagatcagcacatcttcatcttcgcagtcgtcatcatcgtctatcaagtaatgacaatactgtgggaaagctttggtgtcaaacaggaagctgtcgcttaggacgacattcgcaggtgcattcttcagaatatgaaagtcaagagggtaaggtgaggtaaattcatcatcatggccaaaacgccattcaacatcataggccataccggccgtctcagtgaccgaattatcagcaaatttcagtcttgtctgatactcatgtctagtgtgaatgtgcaccccaatacttcgtgcgtaagccttgtccataatcaatacctttgagctagaatcagccagagcactctgtacctgaccattaatcgacccctcaaacattggggtagatgccccaaggtataacagatggaactgcgagatacctttggcgaatctttttttcacacgacgatagaaattgacaacgtttgagaacgtccgagtgagcttcaaaaatggcttcccaatgatcacatcgtggatgcagttggggagaagctggaattcaaggttgtgcacctcgttttcgctgctgagccggaatggcacagttgcagttcccgtagtcgtcacttggttcccactgccgatggtgatttcgcaagtggcattctggcttattggtaatcctaagctaatggcatatttttctttcatgaagtttctttttgccccgtaatccccaaccgcgttggtggaatgctctgcgagttgacaaggtatttcgaagatgcgcaccccgcgattagtggaaaaagcactttttgagtccgattcttgtaacatatatggccgacctagagtctttatattttcaatgacccaactacaaagttgggtttggttattgcgtatacgtttgtctttgctctcagtattgcgttattgactaatgctaggagaatggaaatatatggtgctacagccgcttatgctgcagtattagttgtgtctttttcaggaaattcaggggcagtactagcctgagccgtccagttctcgccgttctcactctctcgtcctattcacccacactcaccctaggagaatttacgttacggatctaaagttcttgagggcgcatatcaaattaaccgaacggactatgtgctatatgacctatgtacggccagtaaccaggtacggcccgagcgagatcctgcgggcggtaggagactgcagtgtcgatgatcaaagctgcagagaccaatcaatattaagacggaaatgaatatagatctgtgattggagaaaatagatagcacagtctaaccttttggggataggccgtgaatcagaactcttccatgttagtcgatcttgaatttataagcagtctttgggggccaagtgtagatagatatttagcggggtttcaaagctcattttgctttgcattctcaaagtcctcataccctaaatcttccctgtttcactttcacaatgtcggttggtcctgatcttgatgatgacgctgtattgaaatggctcgaagcggtaaggctatttcttctagcaaatcgcagcacaactaatttacagcgatatttagttccaccgagcgagcgctactctcaacaccgatcagtggcttgatgaattcatgaccgacgatgtggaaatgcaatatgcaaataaccctgtgatcaagggcagcgaagtgcggcagatgttcaaagccgtcctcggccaactggacatgatgacccacgagatccgctactttgactatgtcgcccctcgtatctatcaagccgcaaccatccgatatctcgtcaaaggagacagcctagacaccgaccaaatcactattccaggctttgctgtcttctccattcggagggacgatgacgggcgtgtaaagtgctaccgggcagagacattcctggaaccatcggcattgtttcaacgaatggctgaaaaatcaagccaaccttagaatattcgtggtaggcatattggtggttgaggtgatagacttgatatctagaccattactgcatgtatccatgtttgcatggtttgttgttctgatatatatttctaccatacaccaatgatctatttacaaatatgccaactcgtctgattgatctataaccaataactctgctttgtccacaattttaaaaaacgatgctattcccagatcaccccaccaattcatctgatctctgtacatatatcctcaaggaagtttcatttgatatagtcctcggcatgtcagattttaatttccttacttagttatgtggtttagcgtagtaatttttaatgccaaagactttcgtctttgtagaatttacccgctggccttgaatatgcatatgccgtgatgatatgggacccaagttttgctattttgttgagatgctaggtcttctactacttgctgctgaatgctgctgaatgctgcccaaacaggtgacggattcaagtcataagctaccttaattccaatatagtaaaaagatagatgaagtgctagagctgtaaaaatgcgaatcatctttaagtatgacaatgcagagggttctacctactgctctataactaccctatgactttacaatcctcttctactggtaagctcatacatacgaccatagggtgtggaaaacagggcttcccgtccgctcagccgtacttaagccacacgccggtgagttagtagttgggtgggtgaccaccagcgaatcctcactgttgtatgtttttgtttttgtttttgtttactcagtatagcaataatagcatgttcattttaggctccgttgtggaactctatacaacatacggagttcccgtcgcaaatgaatgtcaaagctgagtggagaatgagaagaaaaaaaaataacgtattcggtaagcgagctgcgcaccccaaccaacccattgacagttggaccactgggccttaaggtagatcacaaaaattgggagttccgagtgccgttgcgaagaacagcctggggtgatcattcaagcggccactcaccatacctatgcgccactacatttttatagacataatctcattcctcattccaaagccccgtcaccaatgaagcttctttgtcacactcccaatatacataaaaacccattctttggcgtgtgtatttcattctctaagtgagcgtacgctgcccacgtgatgttgacaacacacgcaggtaggaaaagaggattgaatgattggcgtcgggttctcacatgggcattagagctctacttggccaagacgatgtggccaatgctagggatggatcacatagggtgaagtcgaagaaataaacgcaattcgaataaaagatccggtgagacagttgtgacagtctccatcggatagcttatgtgccatacttaggcactttctcggtgcctcctcgtccatactccggggctgcctagcagtgattcccaacaactccttgcatccgttgcattgttatatcgtggcttggttccctaatgactgcaagtatttcgtcctgtcacaagtaccccatcgacgatctcatacataagcctggtaaccaaatgaacagtcactaccagccagcgccctccacttcccaaccccgctaacccctgaatgacccctcgaacccccaagtgctgaaaaaaatcgatcccgcaatcctaagtcaccatacttgggaccagaggagttcatttggccggagtgattgggcaatttgcgggaaggtcttatgcaaggagtgatgggttaatactcatattgatgattattgaggttcacgctgctaggagcggcaaaggaagtgcctagaaactgggtgtaaagttctgtctcagtggtatactctcagtacagccatgtaagggaggtgcaacgttacaacaacaaattctaacgagaaggataagatctgtgccgaggaatgtaacatcctgattatatatataaatattgatgattagtccgtgagttttctactacaaacaaagcatgacgatcaaacaggaagcgcaagtggtgctagcggaccctgctctgcttgaaaaaattgacaaattattcgcctgcaatgtgggagaatacatcaacctaccacaattggtcgttgtcggagatcaatcgagcggaaaaagctccgtcttagagggcttgacaaaattgaaattcccccggaacagtggtctgtgtactcgatttgcgacgcagatcatatttcgcagagatcctaacttgaaagcgcggataatcactggttccatcatctcggcaggacacgagaatggaaatgcaaatgctagttggagcagatctgaaattgagtcattgaatgagaacgaattcgagattatgatggctgaggtgggtcgatattctccctgaacataacagtcaatgaaaaaaagttaagcttctctcaaggttcatgtggcgatgggcctatcagcgtcaatggaggacgaactgcctacattttctgccgacgttcttcggttgaagataattggacctcatgaggatcatcttagtgtcattgatgttcctgggattttcaaaacgacaacacctggcttgacttcaaagtcagatatcgccgttgtgagggacatggtgctcaactacatgcgcaatcctcgatcaataatgcttgccgttgttccagccaatgtggaccttgcaacacaagagataatcgaaatctcgagagagctagacccgaatggaacgagaaccttacggatccttacaaagccagaccttgtcgataaaggtacagaagacaagatcattgaacttgtcgaagggaagcaagagtctcaagaattaggctgggtggtagttcgaaaccttggtcagaaggacctccaggactcttcaaagatccgtgatgtcgaagaagagatattccgcaattcgcctccttggaaccgtatctcaaacgataattacggtatcgaggctttgagaacgcggttgcaagcattattggcttctaacgtgcggcgagagtttccgtcggttagttcttctgaagtactggcatacaacgtctgatccgtgaatgagtgataggtacgatctgaagtctcgaaacgtctcaaagaatgcaaaagaagccttgcaaacctcggagaagagcgtgaatcccccgagcaacagagcaaatatctgctcgaaatcgtgtcaaagtttcagcgtatcactgaggatgctctccatacaaactatggatcgcaagatgcttttgacgacgaagctgatttacgattggcaactctagttgccaatcgtaatgcacagtttcctgatgacttttcttctcgcggccatgtatactgcttcaactcgcatggccatgacgatgactctgaaaatcaatcaagcaccactgcgacctctgcctgcgttggcatagactttcacgaagtcgaagaggaacgggagaactttgtccccaacagaaagctcaataattgcagcgatatcgaagacattcttcatgaccctgttcaaatccaaaattctctggaaaagggtattctcccttggatcgaaaagctctatcaggaatcccggggctttgagttgggaacattcaattcggccatcctttcaaccgtgctgaagaaacaatctgccagatggcccattctggcggaaggctacatttgtgatgtcatatctatggttcacatttttacgcgtaaggcattgaatatatcctgtggagatcagaggcttagtcaaaacatcctctcatttctgatggaagacctcactgagaaatatcaacaagccctttcaatgacggattttctccttcgaattgaaagggaaggaactccaatgaccctaaatcattacctaaatagcaatttgcaaaaatggtgagattcaatgcccattatcaattataaatcgctaatctctttttagtcgccaggaacgcatcacaactgcagcccggggggtatcagtagccgccaaatctgaggaccagcctagaaaccactatgttcggctttctgaccttaagcaaatttaccacatgagtaatttgcaacaaactgtgcaagacatccatgatatcttgaagtcgtactacaaggtcgctcgaaagaggttcacggacaatatgtgtatgcaagcggcagactaccatttggtaaccgggcctgcagcgcctatgaaactcttctccccttcctgggtctataacctttcacacgaacaattggaacagattgctggggaggaaatatcggtccggaggaagcgtcgtcagttacaaaagcaggtgaaggagctggaaactggtcgaaagattttacattaacgtgagtagagtaagttgaaatacagtctatatactagaaaactcaataagaatcagagaaggacgagacagtacagcgggtggggtaagctagggcttaatgtggcgccagattcgtggaaataaaccagctctaacactaaatcaaaagaaccgttgaatatgtagggcggaatttaaagaaaggtcgtgtagctagactcttagccttccaagtatatccatctccggttgatgtacgaggtgacgacaaagatgtcggaatacatgggaaaatattaatcaatagaacatcaacttcatcaatagtaacacatcaaagggactagttaggcatgctatttctaccatgtctgcgtattatgcaaacgtttgattcgcagatcctcaccgccatttgtgacagagccattttctgtagcctctttgtagtcattgctgtgagctccctctgttaggagaatgatgcgatccgagataatcttgtagagcggatgctctgttgttaacctcttttctgtcgcttctaacacgacttggtaggcattgattgccttggcttgctcctgttttttctcccataccttgcccaaactccacattacggtagcgtagtcggggtgctcgctaccttgaaaaatcttcatcttctcgatggtcgtgataatcagtttcacagcttcgtccaggcgaccctgacgagaataagttcgagcaagttccctgcagcccatcaaaaccccaaggtgatcttcactaagacttcgtttaccagcagcgatgccctcgatgagaatatcctcggatttttgcaactctcccatttcagtgtatatcttcgctaggtagcatagcgcctagagagtgtaggggtgctctttgcctatctgggccctacggccgttatagacttcctttatcaaggatattgcgtcatcaagctcttttagatcatatagggccatcgctagattgttcttcgtttcaaggacccttaagtcactctcctctagactttgtattcgaatttccagaaccctctgatgtatgtctctactctctctaaaccggtgctaagagcctaatgtgacacctaagtgatcaagcgctttaagtgtgtcgtcatctccctcgccaaggtatgcctgcattttctcggcagtttattgctgaagttgaagagctttataatattgtctattgagccagaaatagtgactaagggagtccatagctagtagagttttacgataatctggtcctaagaatctctgttgcgactcgacaacctgttcttgtaaggctatggcttcttttaagtgccctagatcccaaagtatactggccaatcctaatattgtgtttattatctttgcgtcgttcgggcctaaaagcgtaaccagcgactcctttgccagaaaaaggtaatatacggacttcgagaaatcacctttctcggcgtgtagaatcccacactttgcagcgttttgaatcatctcttgaattgagaacagtaaagtgggctggaatagtaacgtaaatcgacggtattttccaatgtgtagcctagagaattctctaaactctatcggataggcctctagacattcgttaaggtgaggaattagactcctccgaaaaatagtgtgggactcccccgtttccatcggagggagtggtatggaggccatgagtgtatgaaaggaaattattgcccagaggctcttctccatagggggtatgcggtctcttgcccaagcatggaccaaaggatgtaatgagaaactctgttcgtcattttcatatgttattaatgaggacgaatacaactcgcgaagagcctctctgatgtacaatggatgcatatcatccgcgctttgcttgagtattcggggaagtgcccgaggtggtctgaagcgactgataatagcttgtacaaatccttcccgaaggggtctggttagatattgacgcaactggcttcgcttaaggctcatgcctctttcgaagatattaactcgtatattatcaaagtgatagaagcttacaatgttgaggatctctactgtatcttgacttgggatcgtattattggatacgatgtgttggaatgaaaaatcaaacgcggaatagatatcattattctcgactttcccaccgataatatcttcggtgtttgaaacggattttcttctctggcgattttttaagaagcgtctgtaaaacccgaggtactcacttaagttatatattttgttgtaaattgagttgcctgcctgaatgactgtaagggctaaatatcccagtgtcttgataatctcgtttgctgccgtttccgaggataaatcccatggcggtataatatctacaactttcatgagaaggtggagagcatctctttgcttgagacctttgacctccatactcccgacgttaccttgcctttgaagactgggatttcttgtagttacgaggatatgacctctttctctaggcacaatgaagttttcgaactttaggtcaggcttgtccgcgttgtcgattatgagcagccaattctttcgagcttgggaaagaaagtgtttaccggagacttcggtggcttcgagaccccccatacgtccgactttacagaataattctttcgcggtttgggccgaagttgcatcgatagtgaagattgcctaataactgaacaaagaatatgtcagtgagcgagattcgatatttaggtgctcgaatacttactgttgtcggttgctttgggcatattttgcagatatttgtgtcttcccagatcccccaattccatagacgacaaatcgcttttgctgtttatccatcaatgtctggtcttctggttcaaaggcaccctggagtgcattcatgatgtcctcctgacctataaaatccatggaaacggtgtatggtgggtggaaatgttcattctgcaaagcggcttcgatagcttcagtattgctttccgtggggatcgggactttatccggaatttcaagaaacaggcccgttaattcacaggcttcgtttcttcgcatccgcatcattgatcccattgcctctttccatcgatatgtgacaattgctggagccgagtagcagtacttcatcagggcagatataactgtccgataggcagagtcagattggtgaaacttcgtcatatctgagtggttggagttcggaattccacatctttctgtatcatacagatgtggagcggcagaggacgggtctaccataaactccgcgccgctcgtaagctgtgttctcagcccctcccaaaaaaggtacatgtggacctccttcatgagtggagcgaactgatttgtgatgatgtctaaggcatgcacagtgattggcatttcaggcatgctaattctctccttcgctcggcgagttaagaagttcgatgtcgatgacgatgtacttgaagcaatccatttcccaacatcgatctgatcatggggggtgctgaagaacaagatggcaaaagtcgagatatatatagcattgaggtgtgatgtgaaatgggatgttcgactcgctgaatgaacgagcgcactcttcacgatgatgcctccaagtctgccactagggtagttgcttgactctgaactctgtccatggagtcttttccagtataaagggaagggcttgcgtcataatcaaatgtgagaactcgtgcgttatggatactccgtggcagaaggtctctcagccacaaagtacccgtttcatgatgtgtccatgtctctaacgagtttttccccaagccatggaccgcgacgatactatagaatcctttgttagcgatgtaatacgcccaaccccatagagacgattaggacttctcactcaacaccagcattctgatccaaatctgccgcacgatggctaatgttgtgcgaatgaagtacatgaaggcctaatggcatcgcgcaaggttagatttctgatcgctgtttacagagagacatgtattgacatagcgatgataaggagctggactcctaagcacgtgcgggagttcatgatgggggaattgagaacacccgggcaaacgcatggaatgtattctgaggcatatgcacgatcgacccatcaaggttgtgatctgcgtgattctgagcctatcgaaaaggggatttaccgttttctccgcccttgtcttattctcgtgtaatataaactgcattagtgcttacagtgcatttcgcctatgaattgggcgctaacagccacctatattggaggtactatatacaaaacttcttcccagccccccaagaccttcgaaatcataacaagaattaagaaaatatgattgagaagtatctgatctgggctgtcgttacgtttatcatttgccaaatatgctatcgctcttttgcaaaattcaggagctatcgggtatgtgagaatgttgacattttgagttccattgctgatgatttgccggcgtgattctatttggggatcccaaaagggctgcgaattaccactcgaacttccaaagagatggccatttggaattgatcgcatcaaggatctctgggaaacaaacgcagaaggtcgactccttgcatatctttgcaaaatagcagaagattatgagccccagaacaacctcactcaatatctgctgtttggacccagagcctttcacgtgttacatcccaagaaccttgaggtcgttttgtctaagaacttcaaagctgactatcctccatattctgcttttcaaataaaagcataggctcgttcgctcactggtgttttttttttttatcagattatgggttcggagtcaggccccaaattttcgcgcccctgcttgggaatggcattttcactcaggaggggtttgaatggcagcattcgagagaacttctgcataaacaattcaagaatgtccaatctcagaacttcgaccagttccgcgaacatgtcgacaatctaatcgatcgtctaccctcaagtggaggtgttgatctccagcctcccttctttgatttgaccatggacatcgcaacggctctcctttttggtagatcggtctacactttgagggctggtattgaccagtatcaacataataaactctttgcagaaagcttcaacatcgcgcaagagggccttgccaagcgcttcaccttggcataatctctatagctcagaagccttccggaaagcatgcgctaatgtccaccgctttgtcgaagaatacattacggagtttgatttggagaccgtggacagcaatcaagagaaccgatatggcttcatcaaacagattgctaaggagtcgtatttggggaccgcggaaaacaacaacgagaagcgggctgggcccaacaaacaggctattgatgagtccgaaaggatgaaaaatatacgtgatcagctactggatgttttgctcgctggaagagatacaacggcgctgtttatcttggacattgtatgtatcacacggtcagagatatcttccaggctttccgctcgtgctgaccatattatgctgttggtaagtcgactacttgtccgtcatacgagtgtcatggaacgtctgcgaaaagagatctcttctgtcatggggaccgagtccataccaagtcgggaacagataaaaaagatccgatatcttgattctgtgatcaaagaaagtgagtcccaattgtctgtatttttggtgaaacaggtagacatctaattttttccgttaggcctgcgtctatatccccctgttccactgaacaatcgcgaagcagtggaaaccactattctaccaacaggtggtgggccaaacggtgataaacccatcttagtgaaaaagggtgaacttgttgtttattcacagtacgtgaattcaagggaaaaaaatatatacggccctgatacatatgaatttcgtcctgagcgatgggaaaccggcgaacttgacaatattggctgggcctactttcctttcagccgcgggccccgtcaatgcttgggggaggaatttgctcggatggaaatctcttacacaatcgtgaggatgctacagacattcccgcagattatgttgccatcgggagagccaaatcagcctgtcggaaccgaaagacagcgactaacattagttctctcgagtgctgaaggatgcagagtggaagtccttaaaagatagtcattgggaatggggctcatagagaatggatcgtatatgggcggctatggaaggaagagagatttacatagtaaggaggcaggttcttgtagacagccacccacctcaagaatcatgtatcgcgatatgtagtacaaagcgaagtgtttcaccaatcatttttcattccactagtgtgtacgctaatgcagtacaaattgggtcacactggcgagatgtccaataaaaggccaatggtaagttccctccctcatgaggggtctgaataataccaaaattgcacttcaacctaccttgaccaactctcaacaacattattactccacattcgacactcaacttgaaaatccatgacaatgagtcgaaacaaagaatttcctaagcaaatttacgggatccaagagttatatcgatcgtgtggggagccagttgaggttgagtgagtgcttagttatcattgaaatgatggatctcgttgacaataactagcattgttgccgtccatgggctcaatggccatgcgacagggtcatggacatccaagccgcaagaaatatgttggctgagcaacgcatctttcctcccgagatacatcccccgtgcccgggttttagtatggggctataatgcgagcatcttctcacagaacggaaaggcacccagcgcagacagggttttacaacatgcgcagacattagtctctcaactagaggctgatagggatgtagggaactgtccgagtctatatgaatgaagccctgctgacggttttagctcgaagatgcagcgaaaaggcccatcatttttgtatgccattccctaggcggcataatcgtgaaaagagtaagttgtttaggattgcatacaaggaagttgtaaagaccaatattgttcccttggctaaccatgaataggccttggcgtatgcagagagtcgcgttagactcactcacatatattcaatttacgtttgtacatttgctatcctcttcttcggcactccgcatcaaggatccagcaaagcgaatattcttagtagtcttcaaaagattgtatcgattgcaacccccaaagccgctatagaccttgaatcaggattggtcaatgcactcgagaaggaatctgaagtcctgcaaaacatcaccgaccaatttacaccgctcatgtccaacttccgcgtctttttcttctgggagcaagagaagactgatctcaaataaaaaagagattacatcgtcactgaggcgagtgcagctccaataagactcatcctttgcgaacctttacacaatacgtctggtctatggtatgtgtgcacgcaggcaagttgttgccgtttgtcttcaagttgtgtactactgttataatgcttgagtggtgatgaatatttcctaaattcatatgttcttgcttctttccccgttctcacattaccgaatcttgagagataccatacatctgtagatactgttgacgaaattcgtgtagcgtaatttacactagactataaaaagaacgaaggttcttgcttagggcctagaggggccatatcccattcttgacagctgttatactcaatcggtttaaccaggtgaaaccccaacctcggggacagctcgagtacctgttgcgggatatggcatttaatttgaagacatatctctcttcagtacatagtactagacccagaccacatagggtacagagtccagacactaggtatgcaattgaaactttcagactttaaataagcctacgctaaagtatctacggcccgggccgtgacggaaggcttgcagggttatttgtatgtactatagtgtacattattatcattattattattattattattattattacacttggatatcaatggaaattcctgggtttccgatcggatgggggttatagaccaataaataggacaaaaatagcaaaaagcaaaaacatacaacagtgaggattcgctggtggtcacccacccaactactaactcaccggcgtgtggcttaagtacggctgagcggacgggaagccctgttttccacaccctatggtcgtatgtgctagacatacaactagagagaaatatataatgcatgtagtttatgagagggtcctgcaaattgttggcatacaacattgtatgttgtagtcgaaaatcacgactggcacagtcgtctaacctaattaggataggtcgatcttggcactgttatttcattactccgtacactccggataacatcagccacataacgagtacttccttaatgatctcggcggcctaagagcgaagggactgattctaacttctaatgctgcgcaaagccccctcttactggcttattggctttttgcatttgataatgactcatttcacaacaaacttccggcatcatccatcgcgcaacctatggagtttgcgtttggaagtccatcacatcggcaacccatgacggcaagccgcctaatgcagctgagacttgcccgccttcttacttgtggcgagagcaccggccaggccaaattgagaagagacaccgttaatacgatgagttgagttcaggttcttgactacaaccatctggtaacaggtggccatgccttcccgagaggcgataacggaccaggagaggaacagctcccagatctagggcatgttagacttcatggaaagtactatggtagacgggggaaaccttactctataccatctggggccatatttggccttgattgcgtccacatttccagtccagttccggtaccatctccagagggtaccggagtaatgaacaccgacagtatcaatgctggtcattgtcagtaagtgcacttgcgaggacagtcctagagcccaagtaaaactcaccccttgagttcgaatccagcttgttccagacacttgacatagtaccacagaggagttgaagcatctgcgccacggaagatgtacttgttcaaatacagaccccaaatgaaatcttcgtactgccacgcctgacgcagacctgaaagctgaacatacatagcaccgtcgtcattgagcatatcataacactggcggaagaacgtggtaagcttccggataccaacgtgctcgcccatttccaactgcgtgatcttgtcatattttgtccgtggaatatcgcggtagtcgaggcagagaatacgactctgttgttcaggaatccccgccttgcggagagcgtcgttgccccaagcggtttgattctccgcgatagtaagtccggtaactttagcgccgtagttgagactggcaaatttagcgaaggttccccagccgcagccaatatctagcatggtctcgccttccttgaggccaatcttctcgcagacgatggccatcttgttatcttgcatttcttcgagggtctcctccttctccgggtctgagatgatgccggaggtatagatcatgcgagggccaagaaaccaagcatagtggtcgttaccgcgatcatagttgggacggatctgttcctcatcttgggctttggtgtggaagatgatgtccttgaaaaaggtgaaaaagatgaacttgaagaggtccaaggtaaaagagaagttcgcccagtcgtgacggtattccatgacctcaagtgcgtcgccgttgaaatccaccaagccgtccaggtacatttccgcaaatcgctggaggggaactttgttctttccgtgccatttcgctttatccgcttcgcgcttgaaggtcaagtaatattcaatgggtcggccgggtagcttgactttttcgttggtgcgggggctgctgctggatttccaggaccagaatacaaccaaaagaggaaggaagagaaggattaaaaggaagaagaatgtcttctgacctccattgagcaggtaggtaagaattgtaggaattccgacgaggacgccgcctaggagaaggttcgagaagctttcatttccggggccatccgcgggcagcggcgcattgtgaatggctgggaactatttggagagattagccaggttgaaggcaggagggaggtcaatggcatgaacacacgtttgtcagaccaattccacagtcctctccggtctggagcttcgcaggtttggctgcaggggtcttaatgaagtcgatgtcgccagacagctcgacttcgttgactcctttagcactcattgtcgattgttctcctatatgcacaatcgaggatggggaacgagaaaccatgtattaatcaaagagaagacgggaggggatatggacatcgtgttcgagggtattatagacctgataaacgcggtaatcgataagagttagggttccacatgtgggtcatcggtccccgcgggccccgttagtgtacacgttgcaggcactctcaggttcaagtctcacattccaaatgggcttgctttgtcaacaagcggactgctctcaaagacttattggaccaacttgtgaatttcaatcaaggcatagagaccgaagaggaagcccagtctgatgggttttggatctccacgacttttgtccaggtgcttcgcccgcccatggaagtttgatcctccatctattccaggtcgcagtctttaccccttgccccgaattgtgacaagtctatcgcgtttaagtgtcttcgtagcttttttgcttttcgccgaaagaattattgcaatgcctaagttgatcccacgacggcgcatggtagttgctaatccatatggcccgaatacacgcccactcgggtcattccaaagctgcccaagatgcaaagcagcctgcaagcagtgctgcatgtgaaatctgttggaccgcaggccatctaggagtgactgtcgttgttcagttcgcaacatgcaggagcctgcaataaccagaggaccctggaatatagcctcataaggtgatctagtggcctgctctgcgtatagcatgacattgtcgatatgcttctgtactttcgccaatgttacagtgtcatttaatgcatctgggaccattgcggtcctgagatagaggagggtagcctcccggcagagattgagtgctgtatcccgttgcggctgcgatttctgaccattgactgcagaatctggaggtttatattctgttattcgggcgtagagtgctaggtgcatctctaagctcgcctgtgaaggggttttctctgtgagacgtcgggcggcaagaactgctatgtcgggcagaatttcgaataagccatctgtgtcgccgaagacgactccccatgtgtcgaaatggtccattgtgccgaggatgccgtcgacgaatgtgtcttgaagcacggttcggcgattgatagagccgtaggggacgatattgttactgagaattaaaaaggatatatctccaacacaaatgcaaacaggcgtccgttgtcattgatgcttgacggtaacgagctgttggctaattggataatgatttggcggcttgcgcggaggtggctgaatattgccccttggtcgtctccagatagcgtctagacattgcattagtgagccttttgtggacgcgaggcctaagaccatgtgtttacctcgaagaacgttagtatcatcagtgtcaacaacattcggagtgcctggggtacatcgaatgctgtctggtctgaaatacgatcccgaattgtccttatcacgaccgagtaatgtctgtatatcgcgagagatacttcgagcccagggtttcgggacttcatatgggccccactaagtgctagcaatgaatgcatgagcagctcatcattgcggcacagaggtacaagtagagtcaccgacgggttattgccgtctggagaaaaggaagacagaacgttggccgtttcagttatgtaatgtgtaaagagaaggtttgatgcctgtgtaagcgttgaagctttcgttggagacacggacgaagctgtgagactcgaccattgagccgatgggtctctgggtgatgggtcgagccggtctggactattcttataaccttgtgatgcagcttggactatcaatttctgagactttgagcgcggaccaacaaccggccaggcacattgtaagctgtttcgtgtgcatccaacgcattttggttttctctcatcgcattttttcttgcgctggcgagatgtgagacaccctgtcacggagcggaaccggtgttgtttggcaggggcttggctcgtccggggtgtcgtgggctctgcgcctgtcgaaaatggcgccagcatgttgtacacgccatatgcccttgcaaagcgggattttgggctaagctggtctagaacacaagggttgagagaggcaagaagtcggctggatcgaagtctgtgtcgatctgggcgtgcggcttgaggccccaactcaatccagctcctcttttgtggcgccttcttatctgtaggggctcatgtggataacccaatatcaattcacactccagttcggcgccagcggagcggggaactcatgtatagaccgctttcgacaccgctctataccgtgcactgtaaattgaagctattcctatagaccatacaaatcatcagctgggcgtcaagaaccacctccgaccgcacaaaatgggaaatatgtatggtgggaatagcttcaatttttggactgagttccaaggttagacactttgctttttaagcccgctgtcatgataattcaggttattttgatttctgctagtctataattcaggcatgctcagtaattaggcctgaaaaacctggcattcgatcttacaattttgcccgccgcacccccctttccatattcctccacttatatacaaatttacggaatgccgctcgaaacaagacaagatcatcatgtgtggatgctagccactcttgccaactggtactgggaatgcttcgagaacaactgaacggtactaaccagcttgtccaacaggaactcaacgctgcgttgatccatggtctcctcagtagctgtgaccataagctcaagctgagatccgtgctccacagaaatgatacccagctgaccgtgcgccagcttggagctggcccagtcgcaaccagacgacgagcgaacaccgcccatctcgaagggctccgcagattcttcgctctggtggtgcacaagacaagccatttttgagccaggttgccactctgtgcaaaattctgcgattgcgtcaaacgatgcctcgtcatgggtagtgattgctaactgctgtacctggacgtgatgcaagaaatcctccaccgtccagtcaggttcaattctgattcgaacgggcagatgattcaagcagggtccaatggccgtattcgcgcccaaggaacttccacgcccgtgcacaacctgacctaaaatgatatcagatcgcgcagtttcctcaaagaggacccatgagagagctgctttcacgagcgttgacacggtcatgtccggtgcgagagagggcattgccacttggcgcctctcgactatgtcattgcctgagattcttgccttcccagtttgatcaagggggtcaagggcagcggacggagcaccttgaagatatcgttgccagaatgaaatctcggctttgttcagatcgcccattcgcctataagcgacatccttgaattgtgcagccggtgtgagaggctcattctgataggcttttttgattgtctcccacagcaacggtatggaggcaccatcatactgcgcatgagatatgcgaagaatcaaggcagagcactgtttgatgccactagtcacgagagtgaagctgactggcattataccctgggctgtagagggtggatccctttgctcagactctcgagcaacatatgcctctggatcatcacattgaacaacatttagcacaggctcaacttcccggaggatcacctggaagaaccggccattggcctctatgaataccgtgcgtaggatgctgtggtgagtcacaacctgcctgcacgtgctctccagtctatcgatttccagggctgctgggaacacttgtgcgatcgagactggcgatgaatgggttatgtaaaaaacttggaatgggagcgctgggatgatgtcttccacattatctttgaccaacgaaggtcccgctgcggagtgccaagcaaaaagttctgcatgctcgtcatctgtaatcagagaatagggtatatggtgctgcgaggaagaagctgcagtctgtatcccatctatgatatcgctggggttcaagatggtagcatgctcgacaacgcgcattatagttttccactggaacaaactctccactgaatgctcaatcccggctgcccgagcccttgatgcggctttgagagccgagatcgaatcaccccccaattggaagaagctgtcctcagcaccaatatcatcggctgaaataccgagtattttcgcccagatgtgctgcaattcccgctgcgttcccatggtgggcattcgcttatctgaaggagcttcagcgaacaatgactccagctgaacacgcgttgcgctcgccgctgagtctctcaaccgctttcggtccactttgccactagcggtatgaggtatccgtcgaagcggcacgaaggcagacggtaccatataatctggaaggatgtcgcccagttggcgtctgacactagatatctgggccgtaaagttggtcggggcaacaatatctaaggaagcgatagacgaaatcgataccggtgacgccatctcagccgatttcgaagcgacaaagacaaccaaacatttggaattcatcgaagccatcggagtcacaatctccgccacgatgtccgtcagatcttcgggccaaatctcctgcagtcgcttctcaacttctgcaagctcaaagcgttgacctcgtagcttgacctggaggtcctttcgtcctacaaacgagagagatccgtctttttcataacggacaaggtctccagttcgatacacccggccaccactagtgaggccaagacgttgcatccatgttggacatgagataaagtttgtagctgtttggtccggactgttcagatatccgcgacccaccagaggcccttgaagaagaagctcgcccacagcaccaataggagcgactcggtggggattccgtgggtcggtcacccagcaggcacctgcaatcgggaaaccgatatttccgccttgcgagttaaagtcaattggggactgcacagtaaacacgaccgtgcattctgctggaccgtaaacgggcacgaggcgtgcaaatggcacccactgctggatgtcacttgaccgaaggggttctccaccaagcatgatcgttcggagtgatcccaactcatttggtgtcattgcgcgcaatacactgggggttaaatgagcatgagatggttgtagccctttcaacgcctcggtcagtcggcctctccgctcagcctctgtcaggacgcagatgcaagcacccgcaagcaatggaccgagtatctccaaaatactgacgtcgaaagcataggaggagaagttaagcacgcgggaacctgggccaatatccatcagacgagaaacttccctggtcattgtcataaaagaaccatcctcaatcacaacacccttgggtttaccggttgagccagatgtgaaaaccgcataaagagcacgatcggtaccaaaacgggtcgtctcacgatctggcatcgatgcgcactctgagtcgatgctctgaggcatgatgacgacattgtggaacagcgcctcagcttcctgaagatgctctggcgatgtaagtatgaaaggaggctttacctcctcgcagatattccgaagccgctcttgtggatgcgaggtgtcaagaaggacgaaagctgcccctgccttgagcacggccaacaccgctaccacagtccagcaggaccgatccaagtatattggaacaaagacctctgatgaggctccctgcaaacgcagaaggccagcgatgttgctcgaaagaaggtctagttccttataggataggctgaggttggaagacgagacggctatgcgcaatggttgcctctcacaatgctgggaaatcacatcagtgaccgataacggacatcgtgacgggaatccaatgttccaggcttgcagctgctggatacctttgtcattcagtgtagcaatttcgtgcaccagtcttcctggatgatggtgcacctgctgcaagatgtggctgaattgatctagcatatgttccacttgccatggtggagtgacacgctcatcagtggacatggcaacagtcaccagatttggcttgagcataacggctagctggatggcatatgtatttgacgcagcatccccggacgatgttcccatgggctccatgggatcattggcggtgcccaagttttcaacctctcctctcccctccacaagaagggtttggaacgaacaggcctgcttggcctccgttcctatggcagcaatctcagacagcccaacttgctcgaatggaatgagctgtactgtgcgctcctgcagatctcttagggcatgtgagacggtcgcattatcatcgatttgcacgcgcaaaggaagcgtggcaattgtcggaccggccatgccctcaattccattcacagatgctgctcggccaggagacacaatgccaaataccacatcgtcattactctggtaatgggactgaacaagagcccacgcgaaacgaatggcggtggttcgactgacacattcatccatcactgggccggtctcaattgttcgtaccgtctgctttgaagcttgaggccggtatgatgcggacggaagtgcgggaaatcgctcggccgtcagtccatggaattcgcgacgccagtgttcgagcgcgtctttctgttgggacatggaatatttgataaattctttgaatggagtcatgtcggagggtgataatgcctggccctgataggcctgttgtgcacgatgcacaagcagaggcagtgaccaagagtcatacagagcatgatgaatggtgataatcaggtccagtcgctgagccatattggaatcatcgctcatgactgggacgacttcaaactgcaccagtggctgacctagaagaacgttccagttcaactttttgtgttcctccatgccccccgagatccagtgaagctcgctgttctgtaccaggacctgcatgaagccaaactccgactgaatgaatcgcgtacgcagaattccgttgtgttctgctacggtctgccaagcggtcttcaataaagacagatcaatacctggccctaaacggaagcgatggtatgcgatatatgacccgggacgctccgctgtcaaagctaccataccggcctgcaatgcggtacaggggtatacgtccgcgatttgctcaatcggaagactgcattgttccattgcctgcgatttcaattcttcccggttatttgcggggagtattgagaatggaggcacaggatcatccaattcctttggtttggagtttggccgttcctttggccccggaagcgcgcaattcagtgcgaggtcgctaagcttggggtgcaggaagatatccgagacacctagttgaatgccttgatcgctagctgtggcagccagcctcattgctgcgatcgagtctccacccaagcggaagaagttgtcgtcgggtccgactgtctccgcagggcgagccagcacttcagcccagcaagtttgcaatgcaagttcgccctttgtcatttctctcaactgtcgtaggtggtgactggtcgccttttggccaatctgggatcgtagcgcttgggatgctgcgtgtcgcagttcttttcggtcaatctttccattcaccaatcgtggtacctggtaaacaggaatgaatgccgatggaataagagaagctgggacatctgcccgaagacgtgattgcatctgctccacggccgcctcgaaggcttgaacatcgccactgtcttctggttgaacaatagaagctaccaagtgtgcatctttgggaccatttagtgcgatcaaatctgcaaagacttcggggtcgttggtagggaagcactgctgaacatggtgctcaacctcagcaagttcaatacgctgtccacgcagcttgacttggcggtctttccgtcccatgtattgtatagatccatccacaagacgtctcacaaggtcacccgttcgatacaagacgccttttctggacgcacggatgttggataaccaaatgggatatgggacaaatgccgctgccatagcctccggacgattaacgtaaccgcgaccgacaataggaccatcgatgagtaattctccgacagcacccacaggcacgagcttctctggcttgtttggatgggccacccatgcgacacaaccagcagggtatccaatgtttgattcatcctgtgagaggtattgcggtgaaggctgggccgcggcaatgacagagcattccgaaggaccgtaggcattcatcaagcgtacatgcgatgaccagcgacgaacatcgtccttcgtcatgccctctccaccaagcacaagtgtttccaaggtcgaaacatgctgcggatttagaatgcgtgccacagaaggggtcagtaacgcccaattcacttgcatctcgcggattgtatggcccagtctctgatttcggtctgtatcggagggaatgcagatacagccgccgaccaaaagcgtgtcgatcatttccacaatgctggcatcaaaagcgtaggaggcaaattggatgacccgggcgtttctatcaagacgaagtacctgggtatgtgcggccgatgctgacaggaatgactggtgctcgatgacgcttgcctttggcctacccgttgatccagacgtgaaaacagcatatgcggcggactttggattggtcgccgatgggataatgtcttttcgaatccccgaatgagacttttggctgagttcctccacgatgatgggatttggcgccagattggctgcaagttcaaggtacctcgatgaggtgatgattactggacactggaagtccacttgcaccatctcttgcagtctctctgctggatgcgatgggtcaagcaagatgaatgctccacctgccttcatgatagcgattatggcaacaattgtccatcgggatctctcacggcatacaggcacaaatacctcggggccgacaccaagcagtaccaggtccgtagccaatagtgatgataggaagtcgagggtctcatatgtgaactgaccatcccaggaatcgactgcaggggatgagggttgcgccgtcgtcattcgttgtatgtcagtgtgaatacaagatcgcacagtttgcggtaggttgtaattgaaacgaagcatttgactctgattcttccccattgataagttgatgtcgcttaggtttatgatcgtgggatcaattagctgctggacgatgtgacaaaaggtgtcggccaccaattcagcctgggcttcagccacagcgtgcgtccagtatgtcaaatcacaatcgatggtcttttcacgcgaggtgatattgatcgtgaggtcatactgtgtttttgtgagttacttcgttctgaatgaaagtttttgggggttagacagtatcctcacatacctcagttgaatcaatcccatcttccggttgcaatttaatcttttcagacttatcagtaaataaatttccggcgtccttttgtaatgacatcgcggtattgaacaaaggttgaccggagcgcctcaaagaatgcatgacctctgccaaagagcaatgttggtgatcgagactttgggcataggccgcatgattttcggcaagcgttgagagaactgatgaatcatcagccaaagataggcgacaaatcaacaaattgattaaaggtccagagatgtcgtgcgcatcttggactggtatatcacgacaagcattcagatacccgaagcatacagactcgcttcctgtgtatgcacgaagaacaacaccccaagcgacctgaagcaaactggaaatggtgataccgtgatcccggcagaatgaggagagatcttgtccaatactcatggagaatggcaacgatttcagaaagcttggggcggttgcatgctctttcagtccaagagatggaaaaacacatgggtgaacatcagtcaggtattccttccaatatgattccgaggccctatggtcccgagtcttcagataactcaggtacctgctatagctgcccgcagactcggcgtctagtgtcccattgcatgcttggtggaattcagacagtagtctttgctcagtgataccgtcaacaagaatgtggtgaatagccagctggcagtaagccccaccatcaggctcaattgcgaccgtgagctgatgtggtgggcgacccttcgtgtttgatgattttggattcaacaagaactcatccgaaagagacggaacttggccctccgcgcgcaattccgatcccgacaataccttgatgtttgcctcacaagtcctcagaactacctggacaggatgaccgtgccctttaacaccatcggcgaagacagtgcgcaagatgggttgacgatcaacaacctgctgccatgcttgctttacttgattggtatcgagtgaggagttggctgacgttgggtgcagagaccaccggatgtgcgaccagtatacttgagggtttcttaattggctcaaccacatgccgagttgaatgggcgagcaagggaacatatcttcgattccagacggagatacatcaaatcggcctgagacttgatggagtaggctgtgaaggtgctcttcgcttgcaagtgatagcaacggaaaatcgacagcggcgagttgctgttcctgctgcagctccatggggagttcctcaagggtttgttggcaattgctgatccattgatctagtcggtcctggtgttgtaattgttgattatagatgaaggacaagttgagggagccgttcatgacggttgcgttcacatcaatgagagccatgcgcggcaaatcggctgccatggggagaagggagtcatcctggactgatgtcatctgaagaagggcacctggtcgctcaaattgttggaaaagaccggtgtagttgaaaagaatctccattggggaatgactcttgaatttttccggtccttcagggtggaggaatcgtgacgcaaaatatgcccatccgttcgtggatatgctgcggcggccatcttttgtcatttgcaagatcctcctgacgttgtcctctttcttaacatccaaaaataaaggtgcaatagtggtgaaccatccaactgtgcgggatatatcaatttccggatcccatggctctcttccatgcccctcgctgaacatggtgggtgcaggtcgattttcaaaggcctgaacaaaggcgtaaagtacggctgcttggattatttccactggctgagtatgaaatgcgccatttgcagcaccaattattgcctctgttgtttcccgcgataccgtgatggttcgtcgcgttgcatccgcccaggtattcgaacccaggctagcctctgggccccaatagtccattgaaggacgtggtatttctgtcctcaacgtttcactcggatcaagagactgctgggcatagctttgttgaagccgggaccattgttggaatgatatggataggggttgtatcgtacggcccgtgttgaggatgtcttccaggtcttgcagaaggacccgccatgacacgagatcaatcacaagatgatgggccatcaaccccaagaactgctccccggcatccgtagtgataacgtcaacaacaatcatcactccctgaacgatatcaagcgtgttctggctgattgaaaaaatcttctgcaaggctttacggtcattcatagacggcactcgatgctctctaaaccgaaggcttctagacacatcagggccaataatctgtccccattggccatccgctcgtttttcaaaacgggcgcggagcattgaatgagttgcaacaatcttctcaatcgcccgtttaatctcaggaggtggaagtggtgtgtcgagccggagaatgaactcaagagtaaacttgttgtgaccatcgggcactcgctcaaagaagagcttctggatcggagagagttcaaaccacacctcggtttggtcatcctccgcggctgaggcaaaagacacagatccagaatcttggatcctttctgccagttgtctgatgcttgggaaccggaagatatcagcaacagctactttgagtccgacggtgcgacatcctgcagcaacttgcatcgcgctgactgaatcccctcccagacgaaagaagctttctgtagttccaatttcttcaacagtccgatttagtgtattggcccagatctgttgaagtttttcctcgcgagaagttgacggcgcctccggttgaattttcacagctcgatatgccttcatctgctccagggacagcttattggcgtgctcctggatggaacgtcgattggtcttcccagatggcgtcagaggtacatgcgatagaggtaggtaaaaccgtggaatcatgaaagatggtagaacatccgacatgctagtctctgctgcagcacaagcttcacgaaactcgtcggttggaggaaggaactcgacttgatgactgccgtcatcatctggaggcgacgctgggagacatataaacgctatcagcaatgcctcgggtcgatgttcattggcactgttgcgaggaaacgaccggcgaacatctgcgagggtctggctggctttcggaaatgctctatgaagatggtactcaatgtccgccagttccaagcgctgtccatgtagcttgacttgggtatccttccgtccaagatatcggaaactaccatctccggtagcttgcaccaaatctccgcttttgtacaattttccggatggaggggagccaaattgcaagcgccagggaggtgcttcaacaaagacccgggccgtctgctcgagatttgatagataacccttgccaacgatcggtccttctattaatagttctccagtgcagcccagtggcatgagcacccgatgatcttccgggtgaacaacccatccagatccacctgtgctaaatcctatatttgctggatcgttgctcttgaggtttggttggacactgaacactgctgagcattccgctgggccgtacgcgtttccaacgtgcacaaaaggctcccagcggagaacatcgctagccaaaactgcttctccgacaaacatcaaaaccttcaaggacttaagactatcaggactaataatgcgagtgacactgggcgtcaagcatgcaacgtccacttcaaagcggttcatagattccacaagatgaccgtgacagtcgtccgttgacggaatgcaaacacagcctccttggatcagtgtactgagatgttcgataatgcaagaatcgaacgctggagaggcaaattgtagcacacgcgactctggtgtgaagtggtatggcttgccatgcgccacagaacttgacgcaaagccttcgtggtgaacaattacacctttgggtgtacctgtggacccagaggtgaatgtcagatagacggggtcttgtgggctgatcgccgacctctgagatgagctattgcactgcacctgctccgggtcaaaagtatccacgttgagcaacgcttgaacgccaagctcggccgccagagcgatatgccagccgcaagtcaataccaggggagctgcaacagcttcacacatattccgtaaccgggactgtgggtgtgatggctctagcagcacaaaggcagcaccggatttcatcacagcaagcatggcaacggccatccacttggtttttcccaagagaagaggcacaaatgacccagggccaacacgatgccaggaaagatggtcagccaatgctgaagacaagtcatcgaggacttgatatgagtagctgccatcccagctactgatggccggggcaaagggctgttgtcgtgtgcggctttcaatcagagaatggacacacgggatgacatcagggcgcttggtcaagatgttctgtcgacgcagatcgctcaaatcttcggggctcacggcactgatgttggaaagtgtgaggcccggcttagtgtcgatctgctcgtaaatatgaatgaattgggagagaatccgctccatttgacagacctcggttgctgccggatcaaaagaagcctcaatccacattgtcacggctgaggggcgacatcgtaggaccagaggatacatatcatacgccacttgggtcgatcgactctgggagaatatatcgggaagttgatggccatctcgaggctcgactgagagcagcgtctggaaatgacatgctgccgctggcccaggtccaaggcgaagcagattttgcaatccgacatgttcgaactccatcgatgctgcccattcgtcctgtacttcaatcaaagcatctgcaacggtattcttcccgcacagcttgatgcgcaccggtacgctggcgagtgcaggcccgctcaagtcctgtacgccggcaacagatactgcacgacccgcgttgactgctccaaataatgtatcgtcagagccagtgtagacagattgcaggatagcccacgccaaccgaatcttggtgccaacggtgcttgaggaaccactgccagattgaatgctaaaggacctttccagccgctcggttggtctggcagaatgacccacagtgggtagttgaggaaatgccaccatcgtggcctcgtgtgcatcacggaacatagatctccagaaatcattggctttgtcttgagtctgctgtacatggtccactagtggccgaaaggggtggaaagccagttcctcgtctctgtaagcggcgtcggcttggcgcaacagcaatgccatcgaccagtggtcgcagatggaatggtgaatgatcactttcagcttatattcggtgacattgaagaagaaatatgccagtggagcccctgctctccaggaaggactgctgatctcaccgttgatgccgtcgtcggtctcctgcacctgccatggaattgatcctcgcactactgcctgcatacagccgcgctggctagtgggaatcatgcgagtcctcaatatcgggttggcttgggctgttgtaatccaggcctcctgcagcttatggtggtcgatctctcgtggcagatggtattcgtgctcgatggtgtatgctcttggatccttgaaagtgagggctatcattgcttcctggagagcggtgcaggggtatacatcttcaatctcttccagagagcagtgacattgatcggcaacttgtcgccaaatttcatctacctcattctcctcttcagtcgatggggacggaataaaggtgccttttttgaacgagatcaatgtttcctctaatgaatctcccggtggagtgataacacccgtggcaggcatatctgttgatggtctcatactgtgttcgaggtgctgaatacccataatttcaagtctctttgcttcccagtcgattaggaaatatcgctctctttttggggtctatattcacttacctgttccactcaattgtctcttgtgttattccaggttttttccacgcacgatggatactatcggtattgttactttcctatgggaatagggggtttgtaattggcaaccaagaggcgagttcgaatgagaattatagaatatcgacatccacggtacctagtgctacctacacctcagagtaatcacgttatgggctccatacaggcacaggataaacatcatgcgccctgatccaaggaatttcacataaaccatggcatatacgatttgtaaatgtaacatgatagcttccttgacgtacgtagtaaaagaaatcagcatcttttaacaacggcttcttcttttccggcgatgtctaccttgttttcgttctgccaaggacttgacatgtaaaattcatcatcgattgagctgatttcaagatgtctcacaatatgcttccgaaaatggtaatatgaaagaactgcacgaactgcgtgaactgcctaaatgggaattgggttacatccggaactccacgacctaacccacacaccttgacgtccttgacatcaccgctcactccactgattctaccattcggccaatatgagaaatcaaaaggttgtgatgacctagagactttggtgcctggctttttgattgttgcctggaatcgttcgcgtggtatcagagtgcgaagtggttccccctgattcttaccatctgacaaatgactcacgagctcctttacaagtttattcagttccctagttacacacgaaattagaaccccgaagatggtgccaaaagcccctgtttaacaaaggattttctttcatcaaaacgctgtgctgatggggtggaaatgcattctccgtcaacttccccgcagcgtgtcgacacaccaacatcgccagagaatatctccatcagttccgatatggccgcaaattcagcgaattcaaaagaagagacagccaaaccagcaagtctcggtagctatgcggtgggttatgatttattgatggacccggctttgtctgtcgcttacacccacccctctagagaattctatcatatggtacctctaatgggggtatctatattatgattttgggcctggtttgtgctatggcttcaggagtcgtgagttagagcaactgtcgagtactcaatatcaactaatgaaactccaggctcttccattgatgaatattgtctttggccagctggtcggcaaattcaatcagtactttattccaggatcaggtatcacagagcaatcattcaagtcctcggtcaatcaagacaggtagatatctcgccctctattcctcatggcagcaaacttacgctctccttctagcttatatattgtgtatttgtttatcggaaagttctgtttgacttacatatctatggtactatggctttacccctccataaccctattgttactcacacgatatagatttgtttccgattgaccagcctccgcgcctcaggggccttgcgcctggagtatacccaggctctcttttcacttcctatgagcaagctggacgagatgtcagtcggaactgtgacacatgcgattacagcgctgtcaaatacgatccagcaaagtgtttccgatcggctcgccattctgttccagtcattcgccttactcgttgcggcttacgcgatcgcattccgttattcatgggcactgacgcttgttgtcagtgcggccattgtatttgtggtccttgggtttagcctgacaatgccgtttttggtgaaggcacagcagagtgtggacaaagcggatgagaaacatgcagccctcgccgcagaagtattcggctctattcggacagtattcgccctgggtgctgagcaaccactcttcaaaaagtatacactatgggttgaggaagcacggaaacgtggcctacgtatgtctttggtcagtggagtccaccttgctatgctcttctttgccatgtatgtcagcttctccctggccttctggtttgggttgaagctgtatcgcgaagggcatattgctaatattaacaccgtgatcacgtatgatcatcctaacttcgaatctttatgatgccgttttctgacaataaatcagggtattcttttccgtgctcctcgtggtcactattttgggaggcattgcggggccactgatggctatttcgaaagccataagtgcatccggagccttttttggtgttattgactccaagccagataatatagctggcattcgcgatccggagtccaaccatgctgatatcgtgtttcagaacgtgaccttttcctaccccacacgagcagaaatcaccgtgctcaagggattccatgctcgatttgagcgaaataagaccacggctctggtcggaccctccggttcggggaaaagcaccatcgtcgctttgatcgagcgatggtatcaacttcagtttgaggaagaagaggccacgtcgggccatatccatgtgggagctcacaacattaatgacctggatgtgaagtggtggagatcccaaattggacttgttcagcaagagccatttctgttcaatgactcaatatacaacaacgttgcttttggtctgatcggatcgcagtgggagaacgatacagaacccgtgaagatggaactcgtcaccgcagcttgcaagcaagcctttgcagacgaatttatcgaccgccttcccatggtatcgttacacctcttgcactgcatttctttatgacggaaaatctgattattttatttctagggttactcaaccactgttggggaaggtggaattacattgagtggcgggcagcgccaaagaattgccatcgcgcgaagcatcgtcaaccaaccccaaattctcatacttgatgaagcgaccagctcgatcgatattcaaggagaaaagattgtgcaagccgcccttgatcgtgtgtccaaagatcgcactacaatcatgatcgctcatcggttggccaccgtccgccgtgcggacaagatcatcgtcatgaaagatggccagaattttgaagaaggttctcacaaagagttgatactcaaggaagggatataccatagcttggtccatgcgcaacagctagagccattgacagatttgatggataccgacatgccagtttcgatttcttcgcagaaagaagaagtcagagctcaggcttacaccaccaaagaaagcagcgatcaaaattgccaggatactcccgagcctgaaagagcctttggctttttccacagctttggggtgctcatttatgaaaatcgtagccattggatcttctatgcactgacactgatcggggctataggggcaggttgtaagtatttgccttgctcttttgcatatttccaaatatatgcttacagattccaatagcgggattctccctacaaagttggctttttgctagacttgtgcaggttttccagttcactggcgagaagctcgtgcacgctgcgaacttctgggcattgatgtttttcgtcctcgctcttgccatggcgaccttctatttcatgctgggattttcatcgaattcgatctcgatggtgagtcttacaaatacacggacttcaaacaaagctaactgttcagtttgtcgtgtccaatgctcggatggattatttctacaacctattgtccaaacccgtgtcgtactatgaccgcgaggaaaattcctcgggtactctgatatccagactctccactgattcaaaacagttgcaggaaatgtttggtcccactggtgttttccctctcatctcgatctttaacatcgttggatgtgttgcaatctccttcgcctttggatggaagctggcggctgtcaccttttttgccgccatgccatttttatttttctctgccttcatgcgcattcgatatgaaatcaaattcgagagcctaaatgccgaagtttatgccgatagctccaagtttgcaacggaggcggtccgggccttcagaacggtcactgctttgaccatggaagatacaattttgaaaagatattcaaccctgctgaaagatcagcgtcaaaaagccactcggaaggcgtggtacgcaacgttggtatttgcgttttccgacagtgttgagctatgtgccatggctctcgcattttggtacggcggccagctcctcgcgtctcacgaatatgacccagttgcatttttcgtggtctatatcgctattattcaaggcggccaatcggcaggacagtttttcagctttggtccaaacattgctcaggcgaaagcttctgccaatcgcatattggctgcacggctacctacttctgaacagcttcagcatgttccagtggggccgctctcttcttcggactacacccccagaccctctgttgaactaaaaaacgtctctttccaatattcttctcgtgagataccaacctttgttaatttggacctcgccattgagagcggtcaatttgtagcatttgtcggaccttccggctgtggaaagtccacgcttgtctcgctactcgagcgcttctatgactgcactcagggatgcatcttattcggtggccgggacattcgttctattgaactatcctcttacagaaatgctttatcactcgtcgcccaggagcccaaactcttcgaaggaaccatccgcgagaatctccttctcggtctcgaagcccccaataacccgaacaccgaggaccaaatgattcaagcatgcaaggacgccgaaatttacgacttcatcgtatccctgccagatggcttcttgacagaacttggcgtcaacgctcaagcctcgctgagtggtgggcaaaaacagcgtatttgcattgcgcgagcgctgatccgaaaaccgctacttctccttcttgatgaggctacatctagtttggactctcagtctgaaagtcttgtacaaggtgctatggagagattagcaagcaagcgaaacatgactattattgcggtcgcgcacagactagccactattcagaaagccgatgcaatttttgtctttgcagaaggggcgttgggacagggatcgagggttattgagtcgggaacccataatgaattgttgcacagaaagggggcttattggcagatggtatgtttcccgagccacatctacttcttttgactaacgtgattatagtgccaagcgcaagctctagaccgatgaaaggatgaaattttcaagcagtactcattatttctcttctcgtatcccatacttaatatatctccaagactagcgcaaaacacggcattattcttcaagaacctactgagcgagtatctaatctccttcatcaagttccgagtgtacgaaactcggctgcaatgctgtggccctatgtaatatataaatatatatcattccctcctcctcattcacctcctccaaccacttagttagaatatatgattctctctcatgatgattctagtacatacgaccatagggtgtggaaaacagggcttcccgtccgctcagccgtacttaagccacacgccggtgagttagtagttgggtgggtgaccaccagcgaatcctcactgttgtatgtttttgtcttttgttgcttcaaataggaatggaatggcctatatggctgcagtataaacctcaaagctcaagtgtgtatcgtattagcatatactccgtagaacttcgtgcaacaaatatgtaggagggaaggtgatatatatacactgtaaaatataattttagcaaacacatatcaaattgccgaagatatacatctcagccgttgaatctgacttctcaaggagatatctacttcatgtgctgtggtttgcaagtagccaatcagacgagatttgatatttagatcgatatcacgtgaccatatttgtacctggcttatcgataagagtgccaagccatcagcaacccaaaacttttccgctcattcgatatttttaccgcaagccattctgccaatcattcactacaaaatgttgagagaagtgtaagttatggcaatttatctagattgtgatcctagtctaattctctgccctacaggaaagccaagaacccgcgcactgcgcgcatcctgaaatcgcgggagccgcaactcatcgaacctcccaagaagaccctgattttccacggagcgaaatgcccccaaacgctggacaccgtgctgaagaccttccacgctttgacgaagccctacaacgttcttttccacaagaagaacgagaacttgcatccatatgagaactcggaaagcctggaattcttggcgaacaagaacgagtgtggactcgtagcattcggaagtcacaacaaaaagcgacccaactgtgttacattggctcggatctacaactcagagctgctcgatctcgtcgagctattgctgctccccccgagagatggcgaggtcatcccgcccatcaacgaacttgttatggacgtgggtcttggcctgcgacctatgatgctgttctctggtagcccctgggacgatcctacatcgactgcgcacaaaattctcaagagcactcttcttgacatgttcaggggcgaagagacgacccaagtcgatgtcgagggcctgcagtacgtgatgatggttggtgcggaggagccccaagatggcctctcgccggttatccacattcgttggtacagagtcatcactaagcgcagtggtcacaagctgccccgcgttgagttgcaggaggtcggtcccaagttcgacttcaaggtcggtcgcacacgccaggccgctcctgaggtgcagaaggagtctatgaagcagggcaagcgtcccaatgatgaagcccgaactaagaagaacatcatcatggactctatgggtgacaagattggtcgtgttcacctcggcaagcaggatctgtctgacctgcagactcgtaagatgaagggtctcaagcgtcgggctggtatggagtcgtccgacgaggaggaagagccgtccgcggacatgatggaggtggatgtggtttcttctgatgaggaggaggaggagactcacaagaaggcacggaaaaactaagatcgatttgcatgatttctttaaggagtttgggccggacgggatttcgttttctgcgcctgtatgagcagtcttacggcatatgaaaagttattttaaaacctctacatctaatagagatatttcctccaaccattagtttacactagacttaaaattcgctcgtgtgtccgtaatgaagattttatatacatccacgtgaccatgacgtcggctgtattctcacatgccgaggcccttctcaatgcgggaaccgattaaagtgccgtcccctctctcaacatttcccgccgcaggaaaacctctatatctttgctctatttcttcctaatgacccgtgacagtctcctggtctttactcgttgtccatcgccccgataatcaccccgaaacgagtccgaccttttaccgaggcccagagacgccatggatgtattgctcgtgagttccggagcgtatccgactatacacagcagtattgacattctcctccgcagtcccaactgaacgcgctcgttctaaagcccgaactcgcaccgctactgtcattagtgaagggtgcacgcaatggaatcgtctacggatcgaaagttcgctttccgcatgcgctggtgtatgttagaccttggacagccgaaaaccccggtatatggcatagctgactgactgcgactgcttctagaatgatatttctgttcagatctggaacgtacgtccccacgcgcgacctcaccccccagaacgaaactgatagctttgttattcaggatacgtgaaaagacgaagcttgttttgaaagcaacccgcctgcatgcgcgtaacctggccacatttgccctcatatacaaggcatccatgatcgtgctccggaatataccagctggcgccgggaaagaaggccgatatgatagcttcttcgcaggcctgctgggcgggtatgcggtttttggacgacagccgggcagtattagcaagcaggtatgtaatttggacatgcgcctgattgtgggaactattcaaacctcgactcccgaatacactccttctctgcagagctaactcgaatctagattgttatttatgtcttcgcgcgtgtgatgcttgctctcgctaaactctccgtccaaccaaaaatgcaccctctttcctccctcatcacgtccgatgctcgcagtcagatcatgaataatgcttaccccgttttcgccggtatgacctgggcgatggtcatgtacattttccggtggcacccggagacgctggcgtcgagcctgcggagtagcatggtgtatatgtatgtttaccctccactatatatgattagcctcagtttgagtactttgaaagttcgagttattttccaatgctaacattcatgtcaacaacagttacggcgactcagaccattgggattccctccgcactctgcttctacacaacaaatgagctctcagcggggccggctcttttagctttttggtgtgttatggcgtatagaccggatatcattttgttggtgttttttgcaagttgcattcgagataggcatccttcaggccctactcatcatcccctttttatcctgtattatgaggcatggaacttttttttttcacacatttttgacttgaaatataagctttttcagctttactttgtggggattttcgtaattggatagactcaattgactcaaataaatttgcttgaatgcaagattgagcatataaatttgaagcttgacactccttggaacacacatctcacttttgctgggctgtttaatattgtgttgtgatgtgacatagtaggttgaatatattttgaattttcgaaataatcatgggggaagctgggaatatattcctacgaggcagttcctcattaaggaaggtagtgcatactggaagcttggtatttctatggtcatcgtggtggcagttgaaattcaattcaggggaggagcagaaatgtgggaggtaaatggcatcgtgcaatagaagcaagaatagcttcatcatatcccaaaagagacataggagaggaaggtatcagaagaataaacaagatcaacataacaaaccaaaaagtgtgagcatagatggtacatgtgaccgcatacccaaccaccactcctccatcaacaaatgaagatagaccaaaaagagcctcaaaagaaacctcaaaaagacaaaaaaaaggccccaaaggagcacctctacaacctgggtcactcagctgccgacggggtatggatggcggtcacattccggccaatgacttacatgcaaccctgaccatgggaagaagccatgaagtctcagtctcacaattaagttgatcaagttcaaaggtgagggttgaaccacaggcatctgatcatctctgcactgtaactgccccgccaaaacggaacaattacgggcacagtggcttatgcggttcccgcaaggctacctgggcgaggctttggaatatctgccttgatgttaatgtaaagggaacatattgttccaaattaggactagtacgggactagcacggcccggccccactttaaatgtctgctccacctcttcttccatgcaacccgggaacgttaaaggttatgtgcaccgaggatacattaatcgtacatgttcattgggcttttcgaaaattgggggtataatgatacatctcatccaacaggaaaacaacagggatatcagaacagaaaaagaaaagaaaaagaaacgtcacaaaaccgaactactgcccatccccttcaccaacctcaacaagaaccttgagctccccatccatccagtcaacagcatcagtagtgagcaccgcaatggcccagtccttctgattctgcacatgtagcaggccatccggcaaccaaaccttgaccttccacccatccacaatggtagactcgcgagcttcttgcgtagcagcattcacggcctggaattccgtcaaaccggggatttggctcgaataccgacggagaattgcctgcttgaccatgtcgatgttggagcactggcctgcgggcagttcaaatctggggaggatgcgctttccgttttgcaagatattgacgcgaatagaagtttggctgtggccgtgagaggagtccgttgtgttggccggagttgactcgggcagagaggtgaatggttgatggaagtgtgggtcgggtgcttcggttgggaggccgtgtcgggcggcgatgttctcgcggatgatgcgagacacgtcacgggtgatactactcgcgctatgggtttgttagtgggaattgcaaatgtgtttggaaaggttggatcgattacaattcaactcgggctgggaggttgcggcctccgccaatgcgccattggagatctgaggtggtgtccgcgtggacaatgcggttgatgttcgcatcttcgcaaatcgatgggcagtcgtagttcccgttgtggacgacgtggtaatggctgtcaactgcggcgacgagcccgcgccaatcgggttgctggagaccggagagagaccacaggttatcaagctcaaagttctcgttgtacgtattatagcagcgggcgatctcttcccagtcacctgtgtatccgtctaggaggaggtcggtcagaccgaggtccataggctgggacgaatccattgcggattgctgcatcggcggtgggggagccattgactgcgacagatcatcgcgatgggatggctgattctgcatttgtagatgctgctgctcgggagaaaattccggactattcgccgacaactcttccgttttacggcgacggcgtgcttcagcaccacctcccttgcgcgtctcaatcgcgtatcggcgttgcctttcgttggtgaccatccgtctgagcaaaggagtgatcaatgagatgatcttgttttggtcacgcggccaagtgtgaattctcgtccccacgccatcattaacggcatcctcgccaaaaaaacgttcaccatatccctcagcatcaaggaactggcgaacacagttccaaaggcgtagcttgaccatttctgaatctccccttcctcgctgaccaacacaatcctgtctttcagggtgttcatcgtccagcatgtaatgtttagcagcagactggagatgtataaagttctccggtgagatcccaagggaggcgtacaactttgagatgggaggccgtgtgtacttcttattgctagagggctggcggaacagcgccgccgcagaatgaatacccaccgcacgagcatccgatagagactgctgctgctcaggccgaatgtctatctcttctccggtatagtcattgggcgcttgctgtgcggaatgcgactgatgctcttctccggtatagtcattgggcgcttgctgcgcgggatgcgactgatgctgcgtgtcagagagaccctcgccagccaaggcggggtcgaggttatcatcatcctgatttcgcttgcgctttttggtcgcggttcgtgtgagccccgaggattggggatgttcggtgtgactaggtgctcgcatgtgtcttccgctgctcatgccagccccgaagttcgcgtcgccgaacccgttcccagagagatccatgtctgtgtatgaatccagctggtgatggtggccagctgcgccggctgcggcggcgactgcggcggcggcagcccattgcgaaacatcttggtctgcggcagctgttgctgcctcgactagtcccgcgagctggttgtcattgggcgcatatccgttgttggtcaattgcgcgttcgggtcgaggtggggggcggttgttgtgtgttggggtggaaggtcggaggaggtagtggggagatgttggttggtagaggagctcatagtgtcgattgagacactcggttcgataagctgataatgtcggaaagcggatattgaggcaaaaagtgcaaggattgaggtaaaaagagcgacaagatacttttgcttgagagggaattcgagggaaaaatcaaagtgagttcgaggtccccgaattacctctagaagggtacgtcttccgagtcgaagctcttatccagctgtagagcgtaataaaaagcttcacccattagaggtactgcttcctagagcacagttgtcccagcgcgccgcacccaagagggcgagaagcgcgtcacagtaaaaaaaaaggtcaaaacaaaagtatggagaagtgatgcgacagcttcgtttggtttggctgataagagacgcgcgacggttgatgtttgtgcagtttgaagaaacaacagacagtgcaaactggaaaaacggcgagggtcacgtgattatgggttccattccaagtgaccctaacaacattttatacagaatccatgacatacctgacttgaatttgagcaccgaatctcatggacacgaatttgaagtgtttaataatcatttctatgcatttgaattttagatatcaccctttgtaagaagcacaaggcaaaaacagaaactctccataagtacacccaaaacaagaaatcagtccaagacaatcaaaaaccgtccgactatagcagaccacatgatcctgtggattagaagtaatgatgttgacagatgataaaacatgttccaagggcaggcctccgtcatgacgagatggtaaatagatggcatatagatcattggcccacataaacttttgcaatcgtagaataaaaagaagaagattcaaagaaagcagcacttgatccagccaagacagctcagaacccatccccctctttccaaggacgaccagcctcctgggcacggtactgggggttctggccacgctccatagcagcagttagaaggccaataatctcctgttgcttctcctgaagttggctgacgaggacattgcccttctcgccgtcagagtcatccgattcatcagcaaatccaatgtcggacaaccacatccaattatccaattcctgctggatctcattcctcttcgcttcggcttctcggtaattattccactcctcgtttccgccaaaacaaaacccatacccgtcacacagacacacattctcctcaacgcagagaacaggctgtccggtgaagataaactgccacagatactcccagattcgaccagcgatataatcactcagatccgtcgacagcagccaatcgcgatagaacacaaaccgggcccgcggaatggagcggatgcgatcgcgggacacggcgaattgcgcacagcacggctgcgccagcacagacggaatctcctggtcggggaatagctccccccacgcacgggccagcatgatctcctcctgcttcgactcgtcttcctcgagagcaccggggtgcatccaggccggacagcccgggccgaacccgcagcgagtattcatgtagccctcgcggatgacacggttcagattgaggcggcggagcagctgcgccgcgtctccggcaaagaggttatcgttgtgccaggcgaattggtgcgagtgcatgaacaccgccacgtctgggagctggtcgtagtggtcgacgatgtaggtgaggtagatcatgacctcgtggcctttgttcttgggcgggtggagtggtgctttggggtcatctgcgacatagatggcgtggtcccaatctggcagttcttcggcaatccagctggtgtcttcccccttggttcgggtcacaaccatcaccttggagtaattgtagcccgagggctttgggatgcccgagatgaagtccgggagaggggcatagaggttcttgcttgtgtggccgcgggtcgtgttccaggctcctgttgtattggatgatgagaccaggtcgcccaggccgatgacctggggtacgtcacgccatggtcgtgagaggcttcgggttgtgaggaagaaggcgaggaaaaagcagacgccgagaaagaagaccgctcgccgtgggagaagcatggacggagggttgacgaagcgtgcacgggattattatctgttgcacgagatgatggttagctgcaatgtcactgtatgccactgtgtcgcgtgcacagggtgagaggatggagatcgcgaggtacggaatgcagaaagcttggaatggagcagatgggaaacaatgccttacatagcttagtgtaacattgccccgagattgtaaggaggtggaggaaaagtgacccgatctagattcaagggactggggtcaccctggccggggaggctgctgggctctgggcaaatcagacgcaagtggagtcgaggtcgtgccgtcatgacgaagcttctttcaatgcgatttatagcatagggaacttcatatagaatagtgagttacagttataagagaagaccattgactaattaatacggtaaatatcagtcataatgaagcaatgtaaatgtcataaaatattattcgtcatattaattcatctaacacgggaagcagcatgacgatctctccaagaattcagctacgcggcttgaatcggctacgccgtggacaccaaaggtagatctacctctctacgctatactctcctaatccaatcttcacttgcatatgcacatcttcatttgaccaaagtaatcattgagagcaaataccatgagattaaaccgtggtataaaaatcgtgaaaagaaatctgggtatgatcttttgctcgcgaacaacgccatgcagaaacgctggtgtaaagaaccggggaatggagagggccgggcagaacccgaagagagaaaaatacacaaggaggagattatcaaaaggagtccgggatcaagcttcttcatcaggagtttcctcaactgatgcggtccggcgcttgccgtgggatgtggactcgggttgagtctcggcttgagcagaagcactacttgcagattcctcattggtaccccatgtagtaggaatagaagctggcctggcgtcaaaggaccctctaggagcaacgtcggtccattcctgagacggggattctgcacgatgttccactgaggggacagtgggtgttggttgcagtaccggtggactaggggccccatttacgggatgggtttcagcattgacggtgccgtgcgcatttatcccgacgctcccgctcgtttgatcctgagcaggaacggggaatggagagacctgagaagttacagcgctagccacggctggagcagccggggatgtcactgtagtggtaggagtaggttgtactgtttgttccacaccgccggcactattatccatacgctggagaggaaggagggtccaaccagggggaagagtgagcccttccggtagacgagggtctccagggtttagaacatcagtgcccgggtttgcgccatactggtggctcgttgtgaataaagaagatgccggggctatgtttggaggcggagccggttggccggcaccaggttgaccggcagctggtcggttaacagcccttgcttgagcaagcaaccgctctagttccccccgaagctggcgcacgtgatttagatgctctgtagcagctcgaagggtggcaatctcttggttcagccggtgctcgatgtgcagcaactgatcattgatttcagcagcgatagatcccccagccgcagcttgtggggcgggggtgggggcttggggacggcgcccgaatccaaatccaaacccgatttgtcctccaggggcattcgcaggggggtttgcccgcggcgcattaccttggtgaagattgttgaataaatctccacgcacagctccaaagccgatgcggaagggtccaaactgatagacccgagcacgtggttgtgcatccgcaccttgttggcctggccgaataccaccattctgacctccgcgtgcgttgttgtctgcaaccccggcagctccctgagttcgctgtggcattataacaggacgtcggcatgtcgggcaattttgttgcctctcaagccagcttcggagacacgaaaagtgcaggatatggccacatgggagcttctttgggcgtagacggtcaggaacacgctgtggtgcaggctctccagccgcatcagcccccggttgcgccggccgaaccggaatcatctcttcacggcagatgatacagacatcttcccgggagatttcctccgctgttgcatccggatacctctgatgcatatcccttgtcgcgtttctgtaacgcatgaagtccataattcgacgcgcaaatgagcggatggtcacaacaacgtcccgcagaatgtggatggggaggccgtagaaagtgagcagaatgccaaagaagctcaaataaatcaggagtttcaacaaatcggtcaaaagatccaagtagaagacccaacgacccttctcctcccacccgggcacgtcgatctccaactcattgacatcgttttcgtcgggcagattgtcaggaggggaggtagctcccgcgcgggcatgttctcgaattgcttcgactcgcgcaacacggatctcatccctacgttcctggatcttggcctttatttgctggcgggttatggatatttcggttaacgcgataacgtatcgcaggagggtggaggtcgagaggattagcaagatggcgaattcgaatccaaacatcaccatcatatccggccgtgcctgcgtgattacagtgtgcacacagtaccgtaacataaagaagttgaacgacaccgtcagcacgagagatagcgccagtcgagtatggaacaaccggggattagccggcggctgttgctctaggaactcaacgcggccttcgccaatccatccccagaccttaccgaccagcagcgaaatgaacatgaccagaaaccagcctccaagttcgcctcggaagatggtcatagccagacatgtctctgtgacggcgaaccaggcccgctcgtatagttgttcggtctcgattggtcgcaagcgtccgtagagaagtcgctggagccagaataagataaagccggtgacgagaaggcataaattcgtgaggatctggagatgtggtaatgggttagggactatggccaagcgcgataacccaaactggacaactcaccataagattcgcactactctgagagagatagacgcatgccgaatagaaattggacctctgatggagagcttttagaaacacaccagcggctaggaccactgaggcctgtgaacgggttccaatgttagcgggttatcttccccatcagctgcagtacttaccccagcataagcggccagtctcatggctatcgactggatcggacaagccgaaggtcgtggaccaaaggaaggataaaaaaggtgggcgtctcaaggtagcatttggcggagaaacgaagtgaatgccgtttacttgggaggagtagtagcttgatctggacagctttccagaataacccgtgggcgcctctccgcatcttacgtcagctaccagcacgtgctgccacccagatctatacatacctttacttaacacatgaatagattcgatttcgctatggtggagtatatatttggtaatcatgtatagtctaatatgttttgttgaattcaaactattagactcactttaaacgtcaggacatgtccgtcgatcttcgatgattatctgatcatatccgtcatgtgacgtcccacattgcccgcccttggaagaagcaaccattgtgacaccgttgtcctcgtcatttgcatcgaacagagagatatcgtcatctctgaatcctataataaatgaattatcgggggtgatggcctcatcaccggcattgttcactgcctcgcgcagccaaacactaacttacctcttggcagtgtgccccttctccatcgccttcctagtttacatcaattcatccatctccttcgtcgtaacagatctgatagggctgcagaatggagtcggagatgctgtcggaactctaggattcgcagacgaacttcttgcgctggttgcctgcccactttggggtgtcctctcggatcgaatcggagtccgccatgtaagcttgctactgacccttgtcaggataattcaatgatattgacgctagataggtatgtacggcaggctatgctattgtagcacttgcgctagtcgtttttgtgcaagctacgaatgtctaccctcagcttctcttgggaaggttgctctttagtatcggtggctcagcggtatcgaccatggtcactgcagttttaccaacagtcactggctcagcctttaatgcccagaaatatcgcgcatctatgtcttcagaattgactatcacaccggagcgtgccaggaatggtcattccgtagatgttgatgctttcagagcatcgccgtctgcgcgactctccgggtttgttggtatgtgtgctggctgtggtgcgctcgtggcactggttgttttcctgccgcttgcagcccgatttgagaagatgggattgtcgccatcgcaggcgatccaacgcagctattatctggttgctgccatatccctgattatctgtctagtatgcttcattggccttcgcgatcttccaggagaacaaggcaaaagttggagtgcactgtggaaaacctctcacgaatcggacgatgacgaagatgatgacgatgacatatatatccatcgcccaagattgtcatactggaagcagttgacaactgccctcacattgggattccgaaaccgtagcattggactgggctacgtcggaggcttcgtggctcgagcctcttctgtggggatatcattgttcattcccctggccgtcaatcactattaccgcgcatcgggcctctgcgacgaggaacgtgaaccggttcctgggtcgggattaggggatatcaagaaagcttgcccacgtgcatacatcgtcgcatccatactgaccggggtgtcccaattggtggcattgattgcagccccagcatttgggtacctgacagacaaatcacgacgatacaatttcccccttcttttcgcagcattagtgggaataatcggctatataatctttgccatgctcccaaaccctctgttcgaaagacccgacggcaatccgggtgtgttcgttgtgatggctctgcttggaatcagccagatcggagcaattgtctgcagcttggctgtgttgagtaacggtatcttgcgggtcagcatcgacaatgaaacattgagaaaaatatacgaggagcgccgtgtccgcggggacgagaatgacactgagccagatgaaggccaggctcttcttcccgggtcggccaaccgcagattggagcatctgtcccacctcaaaggctccatcgcaggagtctattcgctatatggtggagcaggcatcttgcttttaaccaaagtgggtggactgttatttgacatcctgtcagcggggacaccattctatattatggcgggcttcaatggcgtgctgcttgtcataggaatcgtgtgtggggctatcaatcacttcggctcctggcccggaaggacatgatcaatttcgctttcatttgtttttaattttataaaattgtcatggtcgtgcaggatcttgttgaactggctgtgaatataatttcattctcagcagggagaaaacggccccaggttgaattatcggcattgctcggctggcaatagagtacacgtggtttgcagtgtcagcggagaaaaacaaattaaactattgaatgaaaaaacggttcagaagattaattaactcggcatccatggcgttgcgcgttcatgaaattgggcacgggctttttcatcgggcgtaagtacacgctaactagtcagtgacggggaaattacaaaagataatggcgacaagtatataagcattttgaacagtaaacatgtactttgtatactatttacttcaaaggagttgagttttcttatatacaatatcttcctccatacacctgaagtttcccaactcatggtgatctcatcccgctagtctcgcgttaatatgaagagcatcaaacaaccttcccaaagaggcagcctgaaccaggggtcaatccggctactagtcccaaaccagcctagtcccacagtaaactttgcactaaaaacgcctctaattttaaaccgcaaaccttcggaggcacttggacgtctaaggttggatcttctcaaggttgcaaggtcgaatgcggaaatgcccccctttttctaaacatcaccggcctcgggaacccctggggctcgtgttggcgtccgcttggactgcaatgtcggccaatcccgctatgccaaactcgtcgcgacgacactatgttgcatggccaaagtcaattatgcgcctaacccccaatgtctctctctctaacacttcttcctctttcacaccttcagactcaagcagtccgtcattcactctttcgtcgtccgacagtctttcgttaaaatccagtccttcgttttgagcaattgttgatctacttcaagtacatcgtactcgcattctttgtgcacatcttgattatcaccaatttttcagtataaacaccggttcaccaccaatctatttccaacatgcgtttctacaccgtcgctttgttggctggcgctaccgccgctgccgccggtaacaccgcaaccctcctgctgcccggcttcaagggccaggatctcgaggctagcattattgaatccgtgggtaccgattcagttgcgcgatcaacgcgctctttgtccgagcaccttgactgaccatccacagaatggagatgcgactacctacaagatcacctgccctaagaccgttgcggcctgtggtattgccggcgagggcatgaccgcaattgctgccccgacctccatgcagctgcagaacatcgacctccagggaacgtaagtaccggcacggactttcctcgtaagaaacggattctgatatcaaaaaccagccttggaactgtttcctgcaacattgctggcaccacttatgcctcctgccaggcttccgccggcaccgtgaccccgtcgggaactctggcccaagaagatctgaactggatgccagtcactatctccgccaccccgaccccgacgtcgacctccaccccgacccatacccccactagcaccagcactagcactagcacccctacccccaccagcaccagctcggaaattagcaccagcacgaccgaggtgagctccaccttcaccccgacgatcacatcctcgccgaccctggtcatctcgaccaccaagaaaccttcttcggcactcatttcgtctgcccctgtggcctcctccacccctcttgtggtcgcgtccaccagcgctgctgccagcggaagtgctcctgccgcttccgccactgcctacaacgccgccggccagttggtaggcagcatttggactgttggtggtgccttcttggctctggcctgcgctttcgcgtaagctcaacgcggaatatctatacgtttccgtcttgtgcggcttttggttgtgaaagacaagcttcgcgcttgtcgatttattaattccggggtttccgacgttgcttcttacggatgtagtcctgtatactccacctatatgtgtccatctcttattctttaatgttttatacctttctccacgacagactacgatctagcgtctcttttttacacttgtatcttcagctattgaatatacctttcctttggttttcgagacttttctttgttgcctctttcacgccccggacttgtagcccctgtggatataatccactcctgaaagatatccacatacgcctcattgtgtctcatttttgggtatgcattaggggactccaccgaccacggtccctggtaagtacgccaccaggcaataaacaatcacttcattctacgtaggactccagcaaaacggcagacacacaatagtgagttttcacccagtcatattgatataagagaaaaaggtcaaaattaagaacaataaaaatacgaaaaacacaaatcaaactcaaagttcttgccaacgccatgcggcactcgcaatactctcgagggagggaataggaatcactgggtcggtctccggcacctgttgcaaggtaatgatgagtggagagatatcaggtaccgcggtaatcggtccacccggtggccggaagaccacaattgactgacggacctgtgtcacatatcgacgctgacccatgatatatgtaggcggctgctcaagcacaacggtctcaaacgtgacctcaggcacagtccgactgaccgctatagtgattaccacatgcacttgcccctcagagttcgccagccaccagtccgcatccgctcgcagtttctttttagcctcagagactccgacttccagaataactgtgggccacttttcgcttcgacccggaggaagttctcggggaatccatgatccatctggttctttggcgcaaatgtctccttctacccgtgcagttgtgagcgaccattccgttcttcgcatattcgcaagagagacagccattactagatggagctcacccacgagggcatcgtggggtcggcccggtatggtaacgatcaggctccgggtgtgtcggtcgtaaagctggcggtattcattggagagaatcagctctgctatgtctggtggcacattggtgaactttgcatattccgtgaccagatccggggcactctggagacgggccagaattgacaggatggcgtaggctgaggatccgatcgtttccaccgcacattccacatcgaaacaggcaaggtcaagatcagttaggtccataatcctttcggcaacaggcgaagagaaactgatgtgtggttccgaggaaaagaccagttctgtctcatcgaagcttcttggtgatcagtcaccgagtcattcttacctcaccgacttcttgtttctgagctgcatctttactcggtaggtttgaatagctcttccataaatggtggaaatgccctctcctgcgattcaaatggtctagtgaagccttcaagggtagaaagttaaccgtgaagctccgcgagctctttgatcactcggataatttctcgtgggcaaggcttccttggtgaataatattttcaatttctatcataagagaaatgtcagagaccagaggtttcattattcatagaaaatatatgctcaccttctggtggatattcgactggcggaccccgaactttgcggtatttagaatctggcacgattgcgatctttccgaaattaggtcacgtccaaaagcccgatgagacagaactgaccatgttgtcttcaaggtctgtatataattgatctgctgccttcttgatctcccgcagatggttttttaaacgggacgtttgcgacgagactagtaagggcaggcggtatttcccgaggatcttcttccagcagtaccatttaacagacgttgatgagattgtatagttgttatctgccagccagcatatcaactccatatgggcctgggctagaaacagggcacggttggagcatcgaaaattttgccttgcagcgtcgatgagttcgccgtcaagcgcggcgcgatcagcgtaatcccaaaggtattttcggaaggcccttctgtccagtctattggcttcaaggttgtttgcgatcgtactgacaggggttgcaatactgtccagtaatccaactgcggtggtgattgcttcttgatacatggtgaatgttagattcaaaactattgaaagatatttcacattcaggtgcagtggcgtctttttataacacaacatgtacttcgaatgagacaaatatctaggacatgtattgtgatcctcacctcagcgcgcggcggcgaagtgtaccaaaacctgtttttctcaaactattccatggattgatcattattagacaggaagaacttgagctagaaacccttccacaacactagtcagaaaatatgaacgactagagaggttgcaaagttggatgagatatcccgcttccaacaaatcatcattattcccttgccactctcttctttgtcacatctagacccataagacggatctgtagcagaagatccagtgagaagaacctcatttagtaggtcatgttacggcatctcgtatttcatgttcatttaagtggacgccacaagtaataaagttttagccgcaagctcagctcggcatttcctgcatagacagacaggtacagatatcagttagaagtcccgatcagaaatattggattgcgaaatttgggttcgaccagacagaatgctgatgtcggtattgttgtggtaggatataatatccggtttgtagctgatacagagttgtaggggatgagggtcatggcactgctagatatgttccggggttcaactttgtttgtatagaccgcgacgtcataaacacttatactcgccacatcatgcgttgacacccaaacaagagaatgtgctgccgtaaataattaaatattctaaataatggactgacaatagagagaggcgaaaacaagaacccagcagggagcgaaggcgaccaaacaaggaaagctcccaaagccagccaaatcagacgccggacataccccaacgaggcgcgttcacgataattccggtcaaacaaccggcgatgataccggcgcagggaagcgtgatgatccaacccatgtagatccaggcaaccatccgccagttgatcgttcgccaagtgccgttgcaaagcccaacaccgacggtagcgcccgtaatacactgggtggtagagacggggagctctgcaagtgtcatgttagcgtggtgatgatttgggaatagataaaagggacatactcagcctggtggcaataatgacagcaatggcagcaccgagctccatagcgaacccacgagagggagagtgcagggtaagacggttacccaagttgcgcatgatgtgataaccgtatgtccagataccaatggagatagcggcaccaccaaatacactggagaatgtgagttaacacgggcgtccttacattgatggaataaaacttacaggatccagatggggacttcggtcttagcgccttcaagggcaccagttctccatatagcatagatggttgcatagggaccgacagcactgggaacagttagtatatgagttgatagtaggtatgaaatgggaaaaccaactttgcgacatcgttcgcaccgtgggtgaaagaagcggtacaggctgtcagaatctggaggaaagagaacatgtactccgcttcgttatcatagtgatcagcatgggcatgggtcttctcgagatcgccagcgagtttgctatcgctcttctgggcgctaacaatgtcttgctcgacaccgtttaggagggccttcttcagcagccagaacaggacaggaccactataccatgctccttcgggacgaggaccacaaatgttaatgacatcgggatccacggcttgcgtcccgttatccgagttggcagtgacctggggctctgccttgagatcgggggaaccaggctcgctgttgctgttgtggctcttttccacatcagtggaacgctcagcttccagttcctctagggtcttgtggccgcgatagtagttacggacggtctcaacacggtcgggaggtgcaggaacttcaccacggcggaagagaagagggccgtagattaggtcccaaggcttgagctgccagtcacccataatcaccctgcggtagatccaggggcaaaggaagagggccgagataagagccatgccaacaccaacaccaataacagttccggctatctcacgcccctcgaggttaatcctgctactgccacccttccagacaatgagcactgtgttttatcagtagccgatacacagagatcagaaatttgacgaaacatactagtaaggaggccagtcgtcagaaggaagtagaatggaatggtgtataacgccctgagtgcgggattcttccgcagtaggataccatacttggtgatcaaaaagataagcgcaccggcaacaccagataagatgggtgcaatcacccaggcaaggaacacctggacaacaccggagttgatatcacctccccaccagataatatcatcagcaccgataagcgcgatacccatcccaaggataccaccgagaatggagtgggttgtcgaaacaggaagaccgatcttagtacagaaggtaagatatagagaggaggcaactacagcgcagcacattccaagcatgaggaggggggcgttgtcggcgaaggcatcgatcttgacgatcttggtacggatagtatcagaaacactgtttcctacaccgacactggaaatataggtgagtacaaagtcaggaagtgggaagcaggtcatgaacttacgctccggcaaactccatgatagatgcgaggatcatggcttgccagtgctttagcgaacgcgacgaaacagacgtcgaccaggagttggcgcaatcattggcgccgatgttccatgcatcgaggaacgcgaatatcgtgccaatggcgaagatgtaatcatactgctgaagaaccatcttgacggttggcagaaagcaacagcttgtcctttctgaagggttctagaaggactctgggggctgacgagataaaaaggaaattagcaggatgatccggattggatctttatatgtgcaagttccaatccaggccaggagatggcagcccttgcgctgtagatgcagtggtgcaaccatccaggatgccaagctgcccaggcccgccgcgccgccaagaaactcctccagtgtccgtgcacttgccaagacgggcctccgccgacgaatcctgccatgacatacgagaacgtgtccaccgatgtggaaagcttcagactacctgccatgacctcgctaaacgtcgggctaattcctctggatggttcagaaacacgaggtgctctttgcgaatgtccttcttccgactggcaccataatctgccttggcccttggcaggacagagcccacgccatgtaggcaccttacataagcctcgcatcgtgatattaaccacatcgtgcttaaatccaacgttcttattggccggctgattaaattattgacattgagctctgaatctaatcctgacatctggcgcacacctggacatcgacctcggttgtcgcgtggccaccgtgacccagctctctcagttcctcgacctgtcgctggaggtattggatgtactccaccgccgtctcaagcagttctgcctggccaagcaagttcgagtgagcacattggtctgtcatgtcaggagattggctgtgtcagttgcctccataccttggtgcctttcgttcccgcgcctcccatcctcattatccgctctatttgacccagagctactttcatccgatcccgttgagacttttgtgcgtcagcgtgctgtatccttcgagtctccgttgcatttggacctgtcatgatgaggagcgagcctgctccaatgaatttctgttagcccatccatctcccctggggatagtgttgacgtcacacgcgaattcaaaatgccaattacctttcggccggatctcgaccaactgtccctttcggtttaggagataaggcaatctcatttgttccgcgtccgctccagtgggctgcgcagttgcatgcacgtgcgccattgttaatatataggttcagcaccgaatttgccttcttgatagcttgatggcttttcaacagcttcaggctatcgggctacccgagtggctatatatattggccacgcaaatgactcgggctcggactttagcctatgcatgaatccatgccgtgcgtcacatagatagcaacgtcctactattaatatccttgattaaagaatgcacgcacagactccaatattaattctcccgaggatgcaacaaacagtattccactcgaggaaggaatatcttattggccatgttgtggcgctaaagggctctagaagaaactaaattaaccttgaaagtcccctcccttttcaccttgcccagttgggtgctctaagatgagtcgtcttcccaattccagtgtcattgcgaccttccgttatcgctgagcaccttgaatttcacgttgatcgactcgcttccttcttatagcaatgttgccatatccttatacatccgcaatgtcgaagttgcgaatgaagtcatagtagaacttaacggcgctcaagtggtcaaagatactcacatgctcatcgacagtgtgaatattgtccagtccccggctgatcgatggggtccacctaaacacattgcgggaaaggcctgatgataccgtcagtttgtatgatatgtggctacccagagtgaaacttactgagataatgcctagtatcggtattaccagtcatgacgtctccgactggaacgatagtcttatcttctgttgcaaagacgtgtcgaattgtacccgagaaaacatcccaaacaggaccactaacaggagacaccggtgcagcttcggcttttgtggctctgatgacaagagtgccattgtagtcaacttcatcacggcgctttagatcactgtgatgtagcatatcactgggagaaagctctgcaacataatcctgatattctttgtcgcctttgaatgcatccacctggagaccatacttctcaactacacccgcaatcacttgaatagccttgtgttgaacctgtaccggcttttcatggtgtgcaacgcgatagttgacagccagggtaacgacctccggcatggcattgattttcaccccgcctttgattagatcgatagcctgtgaggtttgaacaacgaaccggttcaacgggctagtgctggcgaattgaacagcaagtccatcaaagtcattgtttcgcagtagctcttcgatcttgggctgggtgttgggagaatatcgcgcttgacagatcagacgtttgtgaatggggctgtccttgatgatttgaggctggtacggattagcctcgagcgcaacaacaatctcagaaataattccgattcccgtatgcggtaaggggaccgaactatggccccccttggcatgaagctcgaagaagagattggaatggcccttttcagtgattgcagggtggacatatatggtattgtcatcaagaggtgtcgagcctaaaccgccctcgtcaaggataatagcaaaactgtcgtcaccatatctctccttgagtacctcactgatccgtgcagcaccttggttgagaccaacttcctcatcaaatccgaatgccaaaatgagagttcgtctaggtttccaatcagactcggacaaaagaccttctagggccgagaagatggctgtgagactgttcttatcatcggatgaaccccgaccccagatatattcgccatcaaaatgggcttcaaaaggtggataagtccatgtggatgcatcagccacgggaactacatcctgatgggcggtaaggagggttggcttcagagttggatccgagccttcaaatgtgtaaagcagcccgaaagtattgattttctctagctttccacgcttatgacttgaagtgatcagctgtgaggacagtttccatgatggacttctagcttacactgtgggatacgacttttgaagaacagggaaaagcttgtgaaacggaagccatcgctcatcctcgccgatttcgcctagatcgtcgtaggaaaccgacggaacctgcacaatggcctgatgacgttgtacctgtcttttcaacgcctcatctgacgagaacaagctcactgccgacggcaacccatcattggccggatcaagaatagggggtagatcgcatatgaaatcagaacccggattcccagctgtcatagaagtctggccaataaagggcagcacgaaagccgaagcaccagtaagggcatttgccaggaccatcaagcggaggcaccccatgtttttacgtgaatttccgggatcagcccactttcacgatgtcaattgatagatagataatgaaaaagaagagcgaaatcacaagactttgactaaaaggggccttttaaagaggggaaacgctgcgaagtaaaatgagcaacttttacaatgtactcgatgatgacatatcaccaacagcttacgacatgcatggatttcatgctaagccggtttcgatgtcgaggcagctttctcctctctcgaagtcgatatgaagcagctaatatcctctagccatggcgttatcatatcatatatggtctcaactattttccgctttaacatccttggcgcttttctctcgttgacaccgaatattatatttttgtgtatttaaagaagataccttgtcttatgaatagagtgggtaaagtttggaacattagcaactcataaatcctatatcattatgatgaaggatgaagcctaagataaagtgcggagtgaagtaggtacctttgatcagctcttgcgaggccgaactcggcttcccctcattgcaactttgaccccattcttatgccatatccaccatctacaatcagaacgacagtgataggtaaagcctgatagatagagatggccaagaagagccaagcataaaactctccaaacttagattgaaaggatctgctatcttccgccctacctgtccatttgtcattgtgaaatcccccagccctgtctagcagtcaaaatattggctgtatttgtccctaggttacaaaatgctcgtaaattatcgcgaacggcttataaatgtccgttatggcacatctttcctgttcgggtaaacccccggaaaaggtggatgcgcttcacctagctagaagaccatcttatgtacagagcggatggtttcctatctacgaccctctctaatgttgttctaatctgggccaagcattgcacaatttctattcattaccgaagccttggaaatacccggacgagtaagacttaagtaggaaacgattgacctcagcagctgcatcctttcagagaccaattctcaagccaacatgacaggaaaagaagcaaaggagctccctactgagactgttcagcccatagagatcaaaaatctcgcctcaattaataaagaagaagttgactctttcgacgagtcgcaatatgactttgattccgctgaattcaagaacatacccgagctagtgcggacggtcgttggtttcgaggacgacccagaacttccagtcttgaccttccgctcgattcttctatcagcactattttgcgcaatcggcagtattgtttctcaattatcttagtgagtttcgttggcacagattggcagcaaacggttcagcttacaacctactagctttcgaacgacatacgctccgtttccagtattctttgtcattctagcgtctgaccccctcggtcggttcatggcacgtgtactacctgcctatagggtgccgttgggaagattttcgttctctttaaacccgggcccttggtcgaacaaggagcacgcaattgttggcattgccgccaatgctggaagccagggtcaatgggctagtaagggatccaatctatcttgatatgccagaattactgatctcaaaagcctttctgcctacaaatgctgccttgtactataatatcactatgaacccagcagttgccttattctttggatgggtaggctcattcctcgacggactaaagtaacacgctaatttcagacagggttgttccttgcttggttttgcatttgctgcaatgggtaagtacttttggtatctgttactgaataaaaattgacctgtctagttcgcggagtcttgatcgatgatcccgaattcatatttcctctgtccttgcaacaagtgactctataccgaagcatggatgccaaaaacagacctgaccagaaaagagcgcgggagcaggttaaggtatgtatcctctcagtcatgattacaatcctttgaaacagctaattgaatattgtcaggtattttggatattactcctcgctacatttgtttggcaattcctaccggaatacctctttccctttgtggcatctctggctcccctctgctggtttgctagtcgcaaccacactgtcaacttcatcggagctgggcgcggtggcatgggattgctaaacataacccttgattggtccaacatcacttcggtggttatcacgtatccctacagtgtacaagtgattatcttcttggcatttgtcttgacagtaagttaaaaggtctgtgtcaaaaggttgtcctctgatctgttccagtgttggattctgattcctattgcgtatttcgggaacctttgggggtcaccgacttttaacatcatgtccaatggggtattcatgaagaatgggacaacctatccgttcaatgatctaagtgggtatcttgctatgacatttcgggaatatgctgattattttcaagtctacctcgattccaagggcatgcaacactttaacgagacgaaatacgatgaagtaggccttgcctactctggagctcagtatacgtggcagatgttcatggtaagaattccgcattgttacaccccttcttttactgacattatcgcagtgggtagcctcgtatatgtcgtcttttgcttggtgcggtctgtttctaggcccaaagatataccgaatgtggaaggccagaaagcaggcaggatcttatcaccaggatagattaaggtatttacgcctggtgcctatcccatataggaatcctgttattgaccatttttagtcgcatcattcaacggtatcccggtatgacgaagtggtaagatcctctcgtccttctttacgattataactaaaaaggatggcagggaatgggctgcgcttactctgataccattcctaatgcttctgggtgttgttgtttccaagacagtctacatgcctatctggacgtactttgtggcattgggtttcggtgcagtatcgatgttaccgatgagcttcgtatatgcgatgtcgggcttctccataaaggttggatacttcaacgagcttgtttatggatgtaagttgatgtgagcttatgtcccattcctattccaactgactggactacttctacagatatgatcgatgcgaagggctcatcacggcacccattgggccaacttgcttatcgaattatctctggaaatgtgtggtacgatgctcgtacagttctagaagatcaaaaggtttgattatcgacaatgtcattcatgtgatagaagactgattattaattccagattgggcattaccttcacctacctccacgccaagtcattggaatccagattattgccaacatgctcgcactgccagtaaactatggcgttatgcgctgggtcatcgccaccaaattcgactatgtcagcggcaaggagaaagaccccctcggccagtggaccggtcaagatttccaatcgtacaacacagccggcatccagtatgctctcgttgggcctcgtaagctcttcgcttcggccttcttcagacccatcctctggggctttcttgcaggcgcacttgctcccggtgtgatgtggttattgcacaagaaattccctcgcgctcgtttcgatctgtggaatacgactatattctttgcatcagcagcagttttctatggtaatctcagtaccgggccttttacaacctttctcgtcggcactttcaccaacttctttctctatcgttataggagggttttctggaataagtgggcttatatcagtggtgcggcattggacactgggtttaacgcgaatctattgtttatctttatcttcttcgggacaaccgggaccaagatggttcattggtggggtaacaacgctgatagtatcgagagatgctttgccttgaagggatagggagtattatggtgacttatatagaacgaagcaattaggcagctcactacttgaaagcttgctccctgaacaagccccctgagcctgtggatgctgagctgcatccatcagattatgtcctgagatcacctgatctgtcaaaatatgaagctattcagagatcgagcagcatgaagtgattcaaattaactcaaccaccactaatagagataattcaattctggacatgtcatttaatgctaggtagcagagaatatctgattaattaaatgcgaccgatgtttaatactaactatggttcaattgtatgaagttggagtgaaatctacagattagcgacataccgcacaaacctacgatttaattttgatcctaccaattgagaaaacttctcttaacagatcagctgatctctaaatagcttcatcttgacagataaggtggtctctgaatagcatcatggtggtagttcattattcatggtctctgaatagtggcagatcgggtgactcggtgagggattgggtaatatggggctgaatataaaacagatcataaagtggcgataccgtaataaatgacactcgtattgaaaatggtgtgccgagagcgaccttcctaattaggttagacaactgtggtagtagtgattttcgactacggagtacaacatacaatgttgtatgcccacaatctgcaggacccttctcatcaactatatgcattatatatttctctcaagttgtatgtcgagtacatacgaccatagggtgtggaaaacagggcttcccgtccgctcagccgtacttaagccacacgccggtgagttagtagttgggtgggtgaccaccagcgaatcctcactgttgtatgtttttgttgttattatatataggatggggcgatgttatgatattgtgaatgtttaaagtatttcaaagtgctagttttaagtacggaatactagtttagaaaatccataagcttccgtaaccagataaaatctccatcactaataatcagatttccaggacctgacatagttaatcctttaagcctgataaatttaaatactagtaactacttgctgagggtttatatggcagaattgggtataaaaaggcggtaacttactggtagcctagaataaagaaatccacttagtatagatgagccccgcgttagccgcgaaattggataatcgaagaattagaaaaaaattccactttcttcctcctacttattatatgactttcattaatatgatattacaatttttggtagggctaagatttcacaatatgttctaggctataaaggtgtgatacggagactctgggccgggtgggctttgccgatgtctacttacacctccctaggccaacgtaggagttggcttaaaccgacatgctaccagatatgatacggagaggatcgcatggtttctaataggttaggtgagccgactaaccttggaagtacgatctagtacaggagttaggagtacccaagtgtgcagaatggtccgtacgggaccgcatgggcacgtaatggtcacatgacgaggcacatgctcgcacatgatcacatgacactgcgtagttaactaggtaagcgtcaagtaagaatcctaggtcgaatcttcgagaatagattttactcctattttttattttagtttctttaagctaataggaatgatactcacagggaattttgcgaaggtatagttcttattaccaatcgaagcctagtagaatgccaatattaagcttgttatcgatctacagtctatagattattctatacagtatattgtacaagctcacttttttcaacagaagaatttcgaaaagtatatagcagaaaagagcaaatagttcgaaaagctatctactataccaatcaatgtccaccttataacgataaagataagctctataagagtgagtattacgctcatttgataagtgtgatcagtttgattggtatgtgctatttgtactaggatatatgtataagtataggtaaatcagaagggctatagcgagtctacagggcgacaaagccacaataacgaattgaaccgaagatacatcatgtcttctagggctatatatagatgccaagtatcgaaatgtttccgtttcaacttgtaatcgtgtcactttagaaggtcagcgcgggcgtcacactacctagggtgattctcaccctgtcctatagcgcactcacccttctcacccctggtcgtgcgaccgtaaagcggcgctcacccaattctcacccagtctattattattgcactcggtcttatccaaaatcaaattctcttgttctattaatcccaaagtcagggttgtgttcgctcgcttcctatcgagcggcgttcttaggccactcttagcagcagcaagtgctctcctgacggtagagattgttacctgtgcgccaactcacgaaacaggagacccgtcatctcatcggggtagagactaggcttttccggcaaacgatcgcagagaacctccaacatcagtgaggtagtactacgcggtatactgctcgaataggagagagctctggtattaccgaatcgccgcaggttgctgcggatagtgttggcagaacgcgggctacatccggcggcctcagcggtctcagatgttgtcagtgatcaagatcatatcgcaaatgaattctcgagtgggaaggggtgaatttggcgccattctccctcgtggttgttcatctgctggtcgggctaaggtggtgtaagttactgcaactcagaagcagtagcccgattaggccggttgtcgtgatggtcccaaaagccctcgtattcggcactttagtctctagtaatgtagatagcttctttcttccttatgcaactcgagatttcctggaatactctattgcttcatagtagtcctctcggccttactcctctcatccgtttttggaaccttcagtccgcttactgacattactttggccatctttcataacttatcatccactaagtttagtccatattcccgaaagtaaaaccacatgcaatgtcttgggccacacattcaaaatgttaactagccctaaagaaccccccaccaccacctcatgttaaactacagtttgatcgtaaccatcctattctcgggtacaaacaaggattatgccagctttgggccactacaaggggttggtaaagtgcatcaaacgaatcagagaacacattgaaattagaagataaaagtgtatcccaggttctacagcatgaacacaaccaatatggaggctccccagtccctaaatctaccatgcactacagctaacgtgcagatgaatgacttggacccaaccggcttccaacgaatcacccttcatactcttcaccgatttatctaataatgtcgaccctctacacaccatcagagatggctttacaggagaaaaaagctgatcagtggtcaaccgggtgcaccgacatttcgccctcgtacgtgttaagtgtgcgatgaagtagcaataaaaccgagcacctgggccctgggcacaattctggtaaacaatagcgaacataaatacttcgatggctcctggcattccatgctttttttctgaaggctagttttgctcttcattaagtctcatcattactttgaaaaggctctgcaccagcatgttcaagctggccctatcccccgagcagccaaaagccatggctattcaaacccacatcgacggatctttgtcttctgtcttcatgaaacaatacaagcagaacgagtatgcgattctggcgagagccgtggccgatatgtgccaacaagcccttttaaaaaatggcataccccataagacccagagccgcgcgaaggagccggaaagcctccgaaaaaaaattgagcagcgtgagcgcaagaatggacgatacaaaagtctggaggatgttcatcacgatatcgtggatctcgccggggctcgcatcattcttgaaagatgggaagatcgccattttgtcaaggagataataaacgagacgttcaaagttcagaaagaggagttcaagaacgaaaagagtggctatgaagcagtacattatcgtgtccactctaagcaaaatggatggcagtgcggtccccatacaacggaggagccccttgttgaaatccaagtccagtcttggtacatggcgcaatgggccaatgttgagcacgatgctcagtataagacatctaagggtatgagtcgagagatgagcaacagccttggtgtttggctccaggtgtctaaactgaccgaattccttgccgaacaaaccaaagcattcaagaccaagcaagatgcgaaggacaaacgaaagttcaggagtaggaagcacatcggcaactatttggacaagtggttctcggatgatgatgggaatgccgccgactgggcaaggaatcagaaagagatgggatcttccaccgctttagaaatatatttggatgctcgtggatggaagactcctgagtctctaaatcgattgctctgcgagcactttggggccgaggcacaggatgaatactcagacgttgcagcaaaatatgcgggaatcgacttgaaccgtgtaatctatctaatggaccggatagtcctgaattgcggagaaaattgttctggggcctttgaaatccccaacaatcacgaggtacatgcctacaagatccaggtgattttgagtacgttcatctggatgaatcgtctctttctgccaacctatgggtggcagcgtttattcacgcgcattgaggaccaaaagaccgtgcgcgagggtattctcttgcttggaatgagcgcccggcagaattttgcggaagaaagctccttagccgatgatgaggtcatcaagctgaacaggttgtgggattggttttatgcaagtcgtgatcgaccgatcatgttggctttcacaatgtcgaaccagggggctattagagatgttcccaaagagaagaccgatctgcgaaatgcccttcggccactgattgcggccttgggtcggggtggggcttgagccttggcgttgacggccagtgagtagcagagccaaaaggtggagattaaagtgcgatgtctgcaaccgccgaaggttgtgtttttcctgttgtcttgtggcttatattcgtttcagttgacaagatatgtccatcgacagtcaaaatgctgcttataaatctctgcaacgattctgttgattgtttttttagcaaatggtggaaattaaaatagccaccagctctcggaaggtttgttgagattggtccctgcagttcctcacatcccatcacacaataaccatgtgacctgtcgatttcgagggcgcagtaacttcacgtgctagtaaacacagccgataggtgtccagaaaaaaagaaacccaaatgaataaaagatgagctgaagtagagttatcgctatgctgtaggatgtcaattgcgtgcaagtgtaaaaggtgctgatcttgaccacatcaatatagccaaagcccaacagaatcatgtttcaggctaaaacaaaacaggaggcaaacaatgatatgaaattggtaatgccgagatacacctgtaagtgaacatgatacaagcgtattatgatgaaaaataccgacgcgtatatttggccaggcaacctattctgcaaagtagtaatttcgcacatcaaatgaaaagtcgtcttttactgttctctgacagtaaaacttcttgaaattcccacaaaggttcgaatttttggactagcagtgccgtggatgcagttgtgacgagtggccatgtgtttctcgagttgggtgagcttggtgaagcaggcacgaggccgcagaaggtcacacgagaagactgcaagagcaatgcagggcaattcagctatgacgaggcctcgggactcaagcccagtcagaggagctgacacgactcaagcagaaggtttgattaatcaccacggtgagatgattattggagacttgctgacctgtcattggcatagggctcaatgaaattattgaacacctccgatttgaggctcttctgaacggttcccctccgcatgatatctccgaaggtcaaatcaaaagaatgaaggcaatactttcactggtggagaataatggttatcttggttcatcaacagccaaccgagcccttgacttttggatctggtgtgggcggatgcctgggcggtgggctttggttccagatcaaaacctctgggaagaatttttagaggaggacctgttatataagtctaaaggtcagtgcaatttcagagcaaagcaaggagagcaggggaggtacagagttaaaattatttttcattttcggttcaccaacattcttctatccaattagtttttgggatagggatctaaccttttacctgagactgatggagctaaccttgcctagatggctcaaatgcacgaacgcaggaattgtccgggttgtccacgtggatatctcccaattttggtgtcagcagaagacttgaatagctactcaaatgccacgccaagctcaatggtgagtatcagttgaaagtcattggtataccggaaaagttactgacatagtctaatgatcctaaggacaactcccgaaagagaagtcttgcagactccttgtatggaatacaatccaagaatgatggcaaagtggaatacaggtcggccaggaacatggtgggtgggagggacatatgaatggtagcatcgaaaagaggggtcacatagcaccccttgctgtctcatgcaggaaagcacgcagggcttgagaaacctcggcccattggatattcgcgtagaaagccaagtgcaagcgctttgtccgccgaaattgttacaagatgtgtgcccgtgtgccctatgatcctcccccctctcccccaaactatattagagtttggcttagtttgtaattaattcgctccatatttattttttgtcttcgtcaagcctctctacgtccctttgttccttttttttttgaagcctaacctacagaactctacgttcggctttaggtcgagtgttctagagacacagaagaaagcaagaagcaaagaaaaaccgatgatacgctatatgagtctcaaaacagatggaaaaagagaaaacgaaaaaacggttctatctaccctgatcccgtcgcgtgctcactcgacatgggctttgacgcagccttagtaggagcgcaaagagtttccgatagcgttgagtatgtatattcttagtataaggaaggctcaaccacttttgcttattggtggtcattcggtgtccaccacgttgatcctccagctcctgatcaccttttactctttggatgaatcacaattaggctgtccaataagcatttctcttcaattaccccaactcgtgaaaagtaattaagtagacgccagagtacagttcctgtttactttctacaccataagacttctagggctctttaaaaccttgatccaactatacagtagctgtatctcccccgtaaagtataatgatccagtgtacgggctgtgagaacgaatatgatagaaaatcgaaccctcagggtgaggttggcgcgtagcatatgcttcggcgaatgaagctgttaaattctaggaataagattatattactgccccaatagctgcggatactaaaccgaggcgtaataaatatagtaaggtagacgtaggtgatataacacgtgagtatctcttgtgccgtggctgacaggccatctggataaggtatcagtttgtttatttttgtgaatccccgccgaaataagcaaatagtagaagatcgattctcgggtttactgagtcgtgcctttcctccacatcccttgaagcagctgcaatacaagcttaataggaccagcggctcatttgctatgggtgttggagaaatattatgttctatagggtggccccaaccaaagtagaacatggaagagcaaattgaccaccactaggaccatttgggacaggcttattcatcgttcacccaattccccctagtatttgtacggtattccgggcacgttcggaagtacggtgttgcaacacgccgaagcttatttgtatagacccctgagatcattcgaccgatctttaacacctacaatcaatcacctgattctattggacatgttcagtactagccagtacatcaattcctcatcctgacagtatataaaaatcacactctcaagtactcaattggctatgcccatactagtccgtactgtaacgaccacgtttcgacaatagagttatgtgggtcacgacccggtaatatagatacaggtctaacctagatacaggtctaaccctaatgcatgagtagtgcgtatcagggtgacaggacaatcccatcagtacaggggatccaacaccccattgagctatttcaacactaggctgaatgaggatagggttcagggggtcatgggtgactcatatcatcccccaatgcttgtcaaaccccgaaacaactcaggccaacatctgactatctgttattattgccaagatgctggacagactcccactagaaattttgcacatggttatgcaccatgtgagatcttggaacccttcgcaaggtctgacacatctgacagttaataggtgccaagcatcaaggacctcgtgcttttgtctgaggtatctaaaaagctgcatcggatcgttttgcccattatctacgccaaagtgtacatcccagtacccgagcatcacttagaccaggtgacgattagtcccatgaagacctgtttcaagggagacggatccagagataccttcaatagtcttgaattcttgaaaaatgtgcaactggtcgctccattcaatgacctcagaaggaacaggtgctaccggggcgaagtaccactcctaccagtcgaatatgatgactatctcggcgacgaggaagagtttgacatgtgggaagaggagaaaaacagacgacgtcctcatgacgtgatgatgactaatcttgccaaagcactgaaagaacttctctctcatatccccaaaaatactttgagaggcttttcgtatgctctttttcaccactcatttaacacaagaactgtcgtgctaacaatccatagttggaatctgggatgctgcgttcctgaccaagtatttggtgaagaaggttttctgaatttcgaccagaatgcaatccaagatctgtcactgattacggacgggacatgtccaagtccggaatgggagcatctcgagggtctctctgacctccggcacctgcggcgcttgtcgtggaaaggtctaaaccccaaccgtagccaaatacttcttcgtcacaccctgatggcgaattgtgcacaccttgaatgtctagaactagagccgattgggtgtggagaagtttacgtgcacgttgaagaaatcattggcgacacggatgtactaagggatgtattccatttcaataatctccgacatctgtctttgaccaaggttgcgctcgctgcaccgtgtgcacgaatggcaactacattttgcatagagcaattgcaatcattgaaattgcgtgattgtcaccaaacactggaatttcttgagggacttacggagtcatctcacatcatcaaactacggtcatttgaggttgccatcgacgaggaagcgtatcttcaaacttattacgaaagcaacaagccacatccgatcgaatcgttcctgctgtcttttcagggtcttgaagaactgtcgatttcaatttcgaacacgttccacccggtaaatcctatcactgaccctatctgccaccatcgagacacactaagacggttggtatatcacgaggaggggaacgagattcacagggaaagtgaaggcccgcttgcatggaaactcttcaccaaccgcatagttgagggaatgaatttggagtgcattggattctgcttatctccttctcttctggtacggctggctttcccaggtcacattatattgtttgtctattcttacacagccttcttttcagataccgaggcttggaagaagcatcgcggctcaaacagttaagctcttgcattttagggaacctggatctggatgtgtgccacacaccaacgctctgtttgagtttgcgaactgggcatttggtccacaaggacttgataatctcttgatcattgcacatggtgatttttcgcatggtaatcggtttgagcggactcagatccttatgggccgtaattgtgagcaatccagtggatattttcgggtcatatctcgagatcagcgcgacttctggctcaatcggattgatggcgcacatgagatgttgtgtgtttgtccacaggaggttaccttgggcgccgggcgtaatttgtgggactcggacatggaggtgaattcggacatggaggtgaattcggacatggaggtgaattcggacatggaggtgaattcggacatggaggtgaattcggacatggaggtgaattcggacatggaggtgaattcggacatggaggtgaattcggacacggaggaggattcggacatggaggtagatttttatgtcgaaatagataccgatagctcaaattcggactaataaaaaaaattcttgaccccaattacgtcggctcctcgatcaagcccacaaagttctatcaagacgtgaaaggatcgaatcccggagcattgtccctacacaccgatcaagaaaagtgggcgggagaggtttcggtctacactagggagatcactgatgcagactttgtccagcccgcagcattgagggaggttattggccgggagcctggtcaccaggataggcttattgacaatctcgtttccagtgataagggtgtaaagtacccccaattgcgcaaagctgtctatagtatgtgagccttactgctatattcgaagagatccgcccactgcagtgcagtcttacactaacactgaatataggcctttttagtcgagtcaacaaggaccttgggtcgaggttgcaagagcgtactgaagcaacaatcaaggccgcatgagatcgatctccttctctagtatctctgctgctctaccaacgtgcttgtgtctttggaaggcaattccaacgcgattggatagttttgatatgatttgtcttttatggatgataaatcgacagtagcaatacaatctgataattggctcccttatatgactaactcacacaatatttgaattttctgtttttcttttttttcttttttttctttttttcttttttttttttttttttggcattggtcgttccacagaaccattgttgggcaaacgacttggccgctgattgcactacggagcgatgcgtgtggcgaatgacacaccgcgattggctaagaaccaatcttctattagataagtcttgttgcataacaccacatgcagccaaattctttggcacataccgccaccagagcccagtggatttccgaatcgcactttagataatcgagcacatcatgttctccatctccacaggtgaagattccaaggcggcggggctgctcaaacactggtggcgggcggggtagtacaaagcgcgtatttattggaagaacagggcgtattccattgccaggctgctcacccggattattcaagtgtggactacctgtccgcctttaatgcgttcctcgattggctacgagttctcttaggctagcagtatggattactattgcggtactcaataatgttgagaaaaattgttcacttaaacttttggtgcaaatacaagtcctgagcaatagagttgcaggggtgcaatatctgaaacttgcccattttcaggacgaaccgctttgcatctccaataaacgaatacacctcgtgatcctagtcacagtaacagttggtgtgtaaattcatacagaaactgcatatatatgactcacatctgtaattggctgcgataaaaataacccagcctcgtctcgatttgactacgatttaaatctccttaagctctgtgagtccgtgttccacgtactaacccgtttaaaactaatttgcttaccatagtcacttgattcatgaggttctctcaagtgttgtccttcctagctggtttaggaatggctctggtcgatgctaaaagaccctctggaagtaggtaacatctttcgcgctttatgaaccatggctaaaggtagattacaaggccattgcagtagctacaaatcctgtgtggactaaagcttagagaattgtaaatcgagggatcgtcggtatgtccaatgctctatactcataacgtaacctaccagctagccatattaaagctaaatgcggcttgtccttattacgctagtcatcccgttctgtatttgacatgccatacaaaaacgaacccagcgcgaggaagaaactgccgacgttccaagccgtgccccattccccaaaggtgagcttagcagcaatgagagcagagaaaagtgaagccatcgtaaaaattatcatggtataccgggacttgatctcccaagcttcctttatcaagattccacggaacttcatctctcggagttttgggcgatgccactcattcatcatcatgagaatatcactattgccctaagattaatatacagacaacaagccaagcagtggttatctttcatgaacacttacctgtgtccataaattaccttctcgccctgaagaaagtcattcaaggatgcgagcttgggattagaaaatgcaagtttcataaggggacgtgtttcaaggttttcaagctgtctttcggcctcgaacttcgttttctcaggacaatccacgtctatatagtatgacgcacaggtttcgaaacagtctattttccctgtggatagattgtatgggcatgggtattcatgttcctgataattttcaatgatgctttgcagtctccttttctcgacttgcaagtccttcgttttatacattccgacaaactccacagctcctccggggcttcgtaagttcatacccgcaatagaaatctaagaatatttgtcagcaaatttagtagaaaactcttattctcggaacagacctcgactagttcagcgcttttgacaccaggaaaaggaatgtatcttctccaccaacatctatgagagcaccatgcctgcctgattgcttcccatatgatagtctcgtcggctgaatctgagactgtgactggcctaaccgaacactcatattctcctccccagcaaagaagaacacaaacattagcgccatctccaagcattgcctgtaactcagtccccaaagcatttttgcgagatgtgtgggcagcttcacggctgtctctcgtagtggactcgaactcaaagtccgaactttgcacttctgcttccgccctatgtgaatttctatatccacgggtatcaaggcgatggggtcgtatcgttcgacctgcaagtttttgtggtttcgtttccagtggtgaatcttccctgatgcgggcctggcgggtatgatgggcaattgtaaatggcaaagaaggtatttcgagtataaaatatgacaaggttctctgaaccagggtaggatatcgacgattatgatctcgcgatgttggaaaataacctcggttgaagttgtatacaggttcgtcgggtacggcctcttcgagacgactcggcattaaatgagctctttccggcaccaggaggttattcatttctgcgctaaaaattttgaaaaaaaaaaccttaaatgtaagccatccactgttggaagtaaggaagtgttgataaataagctatatcatcgcgaaccaacgatgaggctgagttatttaccccgcaccttcgtcaatcttgcaggcgcctaacgtgtgccagcaaggtttttgcagcagtattaatacgatggctgataaaactgcggtcagattatttttgggcaacctactatgaatctgcggaccacagcccgtcctataattagaccggccccagcgtgagatcaaccactaccctaaccatgctctcgaatccgtgggctgtggaaggcaaagctgagcctgtcaagtccaagaaggccacagccgccccatccaggttcgtagaatgcacttatcattggctcatcgccttggccatatcagcctcgcaatcagcctcgcaataatcgatacgctagatctcatgcctacatatctgagtgcgctagtttcagattgcaggcatattacttaggatgcggtgaccggagaacaatggctggattgtttttccaagaatcgatccctaatttatccgtagaccaagatcttgggtactatttgtgtcacaattttactccaaaaatgagtattaggcagccgtctccctgcaagctggattgtagggatcagttccaggtttctacggtattctgatagatccagctgtcaaattgcggggctgtgaataggctaattagttggaagaaatgaaattgttgaggctatgatggaattgctattatggtgaccttaagcagtctaacactatggctagaagtgctctgaagtataaattatggagctagacatgaatgcatgtgatgatgtgcataatcctttctgaagttcatcgtcacctagagattcttttcggttctctgaactggtgtaggatagtgggagacctagtagagtgagctccggtaatgaccgatatttctttcgaggcttactagttgagaagcaaagaaggaccagaatcctgatgtatccgccgggaaataaaagacgagacgaagggggaacttctaccaccgtcgtttgttgcccatgccggcgataaaggaaaatataccggcctacgtcgtgcgacacggttccagttcctcgatgaacgtactgatattattggtagtggagatttttgtcgcaaaaacccctgcgacactggtttttgcgggcgagagctgggtgacaatcataccttccatccaatgcaaacatcccaaataatttataactgtttttcaggaacgaaggggcatcacgtatcattgagacagttgggacaggatcgatactccgtgcgaaatggtgtgcccagatttgtagtgagcgctaattggcccgtgagataagtcctgtcgagtgtgttcagctgaaggggtcaacgcagtcagtgatcgcgcgacgggtgattctcgccctgattctcgccctgattctcgccctgtctatagtgcactcacccttgtcacccccggtaaagcggcgcacacccatttctcactcgggcgacacccaccgaactgaactatttaccgcgcttaagccgaacaccggcagatcagtagttaagtgaatgattaatttatatttcaatcagacacctcttccactttcgttgaaagtctcagaaactcggtaaacagtcttgtagaacttacagtcaccgaaaaaagatgttggaagaaagaaacgggtaaaggaaaaaaatgaaatgtatcttcgttggtcacaacttcaaaaattgagtgtttgacaacatttggccaagcttcaacgggttgacaggtcgagcacccgcacatcctaccgtgacctcctcgctttctgcagtctagatggacagacccacacaactcaacacaaccagcacaataaggccaggaaatcaagtccatcatttttagggatggaattgtaggcgcttttcggtgattcaaggttgagtcgctcacaaatgagatgatcacaacacgaaatatgagctctgtcaatgcggattgcgtatctcccacaaggtctcaatttaagagggccgtgaaggattcaacagtcagccaatgcttgaccgactctgcatcccttttccccaacgccactcttactcgtctctcttgctgagcacgtaaacgcatcaaaaatgtcgctgcaaatggttgctgtaaaagaaagacgtgggtttcaacaggcctcaatcaagagaggtgtccttcaacgcttcctaccaagttggtaagtgaagagaaacctatgaatacgtcctctacccctgcaatttgctctacgatttattcactcgattctgcaaagtcgagcaggcttgtgtctgacgcactcgataagttcttcccctttgatcgagtactggaatttataccgtactaacatttatagtatacatcgtagaccagcaaatcagacagttccagtactgtaagagacgtgattccaagcagattcactgtcccattcacgccagccgatcgaagatacgagatttggattagctggtcaaggtgtctatgcgaagacgtctctgctatagcgagctgatctactgtcgcggctccggttgaccacagatttgaagtgcaactgctcacactgtaggtatatgagcccacaagtccttcaaactgcactgacccgaaagacgcgggacaaccagatccgtggacgttcgaccacaatgcaccagggcaagggcaacagcttgttgtcgtctcttcatccctggtcttgaccatcagaacatgtgagtcgtggaatttcacgctgatgtactggctaataattgacagtgaacctttgggggctcaccagagcggccctgttaaccctgcagcgcatgacgccaggtcgagcggggaacggaatccgacagtcataacaaggagaataagatgcatccaaagacaaaacagcttcacaacgcgcgcagcgaacacccgacgagcttgcaagaattggaacatggcaacgcaagcaggggcgtgtttcaagcacaggagacagaaaggaaagccgacaagcaggacatctcggtggttgaatggctgcagatagacgaacttggcgcccacagtcacagcaaggccgattagataacattttggaacaaggagacaaaagcaacaagaggggcaaatacaggagagaacatactgactggaaatcgtggtggtaataaacagcacgacgttgcaataaaatgaaggacaaggtgcagaagacgaagcaatcatacctgctcaacatgcataagtatgcggagaaaaccctagaaccctaaagccaagaccatctaatccgaaaaaagcgacaataatgcaggtaccggtgggcaggaagagcgaataagcgacgtgcgtggcagaacagtccatacgtagttaagccacctctttttgcaccgtctcgcgcacacgtacatccgtgttgactattccctttctctcacttccttcgtttcagggcatttcggccatgtattatctcgtaatttcaatacgtctgacacctctattcccctctcccgaagcagctttcctcggtaggcgcacttaacaatcaatcgcgagtggtccaaccaaagatggctccaaaccttgctccttccaagcatgagcttatctacgacatgatccacagtggcgaacgatctatcactaagatggcactggccgctggttgcaacaagagcaccatctggagaatctcttccaatataagaatgtttggcaccgtcaaagcaccgccaattaaaggcggacgaccccgtagtatcactccactcatactcgaggctttatgcgaccatctgattgaaaagcctgccttatatctggacgaaatggtgatttttttatgggacgaattcgctcttcaaacaacgaaatcgagcatcagtcgcgcccttaagtccaaaggctggtcaaagaagactgctcgggtcaaggcacgataacgcgaccttgaccttcgggacgagtaccatcattttatctcagacttcaagtcttaccaccttgtctatgtcgacgaatctggatgtgataaaaggataggcttccggcgaacgggttggtcccctcttggtactgcaccggtccaagtgtcgaaatttcatcgtgatcagcgctatcagattctgcctgcgtatgcgcaagacggcattgttttgtctcgagtgtttaagggttcaaccgacgcctccgtctttgaagattttatcgagcagcttctccagcactgtgggaaatggcccgagccaaagtctgtgctggtgatggataacgcgtcgtttcatcactcggacagaattaaacagatgtgctcagaagctggcgtaaagctagtgtatttgcctccatattctcctgatttgaatcctattgaggagtattttgctgagctgaaggcctttatccggcgtaattggcaatcctacgaagaaaacccagctcaaggattcgataacttcctcgaatggtgtgttgacgttgttggtgcgaggcagaagagcgcggagggacattttcggcacgctggcctagctgtagagatatagcgctactgcggcagcagggttcgggactaacctcacgggcaaactagaacggattcgtttacggacattattgcgaaccatattgtattctgggctcctgcaacattcggatatacgaactgcatatattcttcgacatgtcaatgtcatcgtaccaatttctaatgcactgacagggtatctaaccacccgccaagtcgtaagcctgtaagatatcccaaatgtgtcgatccgtcttctctgacatctagctcctccatatcacgaaggacccgctcaatatattcgccagcgccgctaaggttcataataagtgcaatggcgcggtggacaccgagaagccggggtgatggcggatctaccgtgcgatgaggacttagggtaagcgaccgtgtgacgggaaacaaggggtcacgtaagaaaggactgcgttctgtcgagtcaatcctatactggtgtcgtgtgccagtgcgttcgaaatagatcttgaattcgccgaatagccggtggtagtccagcgttaaagtgagggcgttcatgggactgtcaattttgggtccatcaataagatggattattccgggatcgaacatgtccaagatccgaagagcatttttctttgaatcgctctgtgcataacattagcaccgtcaaaataccaatcccaataatcgggcataccaaatcggattcaccagaagctaccgtcgtcagacaatgagggagaatgtgggcaacctccaagtattgaaattgatcgctggactcatccttcaataggtttccgtcatcatcagcacaagattccgaattctcctcgaaccgctttctggcttctgctctatcgaatttccgagacactacacagcggtggcggtcgcgcataagacatttctggcgcaaaacagatacacgttgcctcgttccggtcggtgttgagctctgcagcgatgataacgacgtgggcgttggttgtggtgtcttgactgatgatgctctaactataactgcgaattagcatatactcactagagatcaagcatatgtatatgtaaggaattaacgaacggggaaggagaaaattttcaacgataaactcagcaaacttttccaggactccatgaagcttgtttatttgttctggttcccatgaagaaaatccctcgaagaataccaaggcgtgagtaatctcagaatcaacggcatgtccttcatcagaacgcaggtcctcatagatgtatgtgaggaagaaagtcataaaggtatccggcgatgtaacgtgctcgagagtagcctggataagtgccgcaggccgatagcccttccgcccggtcttctcggagccataatgctgtacaagcgtgatcactaggttccttgccgactcatgctgttgtggtgttaatgataagggtattgagaagtccaaaaccccctctagggaggactggtgacggtgagtcgccatcgctgggaacttgcgagccttagcgtgaggggcgagtaagatggtggaggaggcatgtgatgagctgactcatcacgggtcaaggtcggcccgacagaatctccacagaacgcaaaggtagcgaagtgcattatacgggtgcactaataggatcggtagcaggcttcgagtgggaaacttaatcaagtcccaatattggcaaagaaacaatatggcttaggtggatatcttctacaggcggaaaactcacatgctcctggtgttcaacggtgttttatgttcaacgttgatgtgaacgttgattcaactttctgacatcattcaccacccgtatatcgcccaaggtgctggaatgagaacactcaaaaaatactatcaggtcggcacagtaccaacaaattatgacaaagaagttaaagtctccagagctcctggaagctcaaaacagaccctcggccggtcggatctttatcgtggcagcgcggcgcggctgaaccatcgccctctaacaacccccaagtcgtgagaaatgggactcccttccacacgccctatgagcaacaataatttggcagccatgttcctcctgggaatatgccctaaataaattggaggctcgagcatcatgtggatacagcaactggattaaaatatccttgattcgatcgtgcgtgtacgtaccactattgtggccatatattgacatccatagtcctcctaggagccggcgctgataataataacccgcaaaaccttgactgtggatggtgggcatgaccgcttcagcccgaaacatttaaaaggttataattgtccttacggttgatgctttcttgtccatcttttgctccaataacttgccagtacaacaccattactaacgaagccaatcaatcatggattataacctatcacaggttccaaagaagtccaataccccagacacagaaggccataatggacgtatatgccaaactggtatagttattttagatccccttctcgaggaatccatcgactaatatacctatttcatgaaggcaatgaattggctgaaaacttctgttgtgtcaatggtctattcatctacgggaatcgcagctatataagccaggttttacaaccgcctgttggctaatccactggccctgtagctatagaggcagttacttccgttggtacctctcttggtagctcaagggcctctacgttgtctccaagcgttataagggctgaaaaccaagacctgccccctctgaacgtgaaaaagagagcagccgaattttcaactgtcctacgaaagcgacgccggtatttatactctacctcataaataccgggccacttacaactggcgtatcaaaagagacccctatgccttataaaaattagtaggaaaatggtcaatggtacaatttaatacctataaacgctatccgaccgcatcttgatctgcgataccatttcccctagggagtgggccactatgtatctcgccacctaattgctacagagtaggtacgaagagatcatcgtgaggaaagagatggaaatagacgctgtgcccgattttgattcaccactaacacagccagaagagaagtgccggaagtgtgctgctgcagacgaggagcggctgtatgactgagacgtaccccgttctttttaccttgtcggctatattttgatagtgtaaccggtcatttgaacttgaggagcaattatagtgttatgcaaccgttaatcggcatttgagagcctgttgagctctaaatctatcagtatatgactaagggacttctaggtgcgaaggatttgaacggtttcctgtgcgatgtcactacgcttaggaataagaaagaaatgtacaaaaccagctgcatcttgatctccaattaatgtaatatattagagaaatcagatagcgtgtgcgaggccaattgcggatagtaatgaagaaatagcaatttcgtaagttaaattgcctcgaatgtcaaaatcagccactccttacattatttaacccgcttccttcgtaatggtgcaatagctccgtgccctacaagtatcgaaatatttgtgctattctgttaatcagcttatggctgctggtcctgataactcggcagtttggctgtcactttgagtctaaatgtcagcatattaatccaagtgactcattatggcattagttgtagactatattaaactgtagtattggtaagacaggtaattctagaacgccgaggcctaaaccagctgtgctagtattcgtccgagaattttgagagagcgactcgccctgctgaaaagcgagcttctaagccaaaggtatacctagccataaataagtctactggattatctctctttacctggctaatatggtcgttgcagcgttaactagatgctggtcgtatggaagttgcgagtgattattatatggctatgtaagtggaactctgtgcaacgtaataatcactggtaagtttgccactttatggacctactaattattgtaataaccatactatgtctgatccgatgcgctcgttgacttatgagcgaaatatgaggccgctattataaagaagctgccgcagactctggctcgcttgatagcttccgtctctttatttttggcgcgttgtcggttataggaaacctagaatctgtccgtggatatcattccctagcgctgttaagggtaataagattctgaggaagttgagttatgttgagtagtgcggttatttgtcgattcgtatggaatccttaattagctcgagattcatgttcgtgatggctgtgcagcttattgttagttggaaaaagatacatatgccgtcaacagtttgtatgtaagcgctgtggctcatcggccttatcttacgatagtcagtcgaagctgccatctcctatcatagctgagagtcgaacccgtaacaccgcgcgtataaaacaaatggaattccactttctctcttagttcttgcacattttggacccgagaaaacactgtcttgttatcatgttatccaacctattgaaagataacaatatgatatgtgaccttggtactatcaaagctcaatctcagctccctatttcgatgtcggcccccaccacccgcgagagtcatacggcggccactacgaaactaacagaacctcaccgccgcggtagattgaaggttgtcacggggcctcccaaaagcctttgcctaccccacttgtgtggcctggagaatatcgcatccgtcctgattgtaagacaggagtcaccgtgggatacctatcggaaagtcattacgtatgagaatgctggcaaagttacaattgccacacgccgcactcgcccgtctcgcatggtagccatccggacatacaggaaagagaatgctcgaagattgatttacagattcggacgcctagaaaacaggaacgttctctccttacatgaatgctacatgcacgaagatctcgcgttcttcttagttgacgacttgccgctgacgctggcgcatgttgccgcttttccatctgtttatcctagcgagacagaattgggatccattatctgccaggttggtccctcatgcccttcgatgagctgttctgacattttagatcctggatggtgcctgctacttatcttcatttggccttacgaaccaatcactggcctgtggtgacatattatttggcattgacgggatcatcaagataagtttgttgacggccgtatccttgcattatctgactaacatttcgcagcaagcttggacctttatatagattgcacgccaaagcaatccgaaatcgcatatattgtggctcttccgtcaatcatgatgcggctcatgcagaaatatgacaaagatcgcacacgtctgaaaataccacatatacgacgatagaactctttgcgtcgtatgtagaggctctcaacattacaacactcggctaactggatcactatactagacatgctatttttcccacctctaagagcatcttcaataaggagagaaatgcagtattgtccagggaaatgaaatatcgttgcagttgttgaaaaaaacaagtggcaacatataattcaggacaggcggctggcactccagcgcatcactcatgaggccgaaggtcaggccatagggatacaaaaatcccgagatgttttgcaaggacaaaagtctttccttcagaccttgagaggagtcatatccgtacttgaggcctcccttacacaccgccacccgccacccaaccaaaagaactttacttgcctatattcatatcttcttcttcccagacggggagacattttaagtcccgtgttcttcagttgagtaagacctacggacacttacccctcccacataataggttgaccaacgggttcaatagtatggttcgagaggctcactagcgggcttttacagtatgagccccggtccccaaaagcgcccagacttgcagcgtcactttcccaaagggggagtggaaatatggtgcgaatgcgtatgaaaatggaaaagagccgttcttccctcgcctttaggcagatacatgatatttctggtgtgcatcttctcagtttgtaccatttcatgctgacttacagacaccactctgaactgtcagacggacccagctttccctcatcttggaatagtgttggtcctcagtaaaaagcttggatgaagtacggaagacgcctccaatgggacgaacgcacggcatctggatccttgatcgatttagatctaagacagtagaagggcccctgcccatgcacctcagcctaccatctccgttctagaaccccaaacaagaggcggaacctcaaaaacattttgtcgccgataacatgccctgagcacgtcagttttatatgacagttccagtaacgattgttcctggaccagcggtcaatgcgtgataatttttgagcggcttaggctgggctgtaggcatcttagcggtgttcggatgatacttgaatggtgcttgaattcttgaaaatgatcatgagaggaatctatccattttaatactcgaaaggtcctttgtgactgaagatgacctattatatcttatggtcttggataatgtgggttcaatatgcattgttaatatctaaaagagatacataaagggtgtagattaaaacctccccgaccaccaccccaaaagactacatacactcaactggaagcatttagctttatagttcatcatcctctccgtcaaagtgaatattccatccatatgtcgggcccacacaatatgcgctcccaacgagcaacttggagttacaactgtccgcattcagggatggattcacttccaagaacaagctccaaggaatcgattcttgaacacaaatcgcggtgcaggttacttcaagctcctcattgctcacaacgtgccatttgccacaccgcagagttgttccattggcgacaggcacgtcatcgggcggtgtaatttccggaatggcgtaaccattggcatagtctggcgtagtcgtatccgtgtctggagcatcacccgttgagtttccggcctgcgggcccagacagatgacatgtccgtaagctacgtcgctgttcatgtgcaggtttgtacactggttgttgatccacgagttatacttcttcaaagtgaggccgtccttgtatccgacattttgggccttttcgatagaactgcaggtatcgcctgtttgaagagtatagatattgtcgcactggaaagggatgcagatcttcgtgcctgcgggaatatcgttacagtctctcaaattgacgttgcccatgaaaagagcagcagaggcgaccctgtgtgtctgagaaatcgagtcgcaagtgtctcctattatagaagtataagtgacatccgaggcacagaagtcggtggttggctcatagggatcgatgactggcgtcaaagggtctgggatatccgtgggcacagtgagtccgcactcggagttaatttcttgtagctgtgattgccagacttcactgtagtaggagtagggagtggattgcatctttttgtaacggtccactctgcaaaacgagcaaagctcgtcggttgactcgtcaaaggatgtttgtttattcaggacatctgttggcaaagtaatttgggttagaaatattgaataattcgcaaactcgagcgtgatatcgaacttaccaccgcaatacttcccagtatcggggtctttaacacaggactgattccacgacgcccagaacctacctcccctgagagtaagcgggaagttggtttggtcgacactggcacagttgtctgtgacatggtcgaaccacgacttgatggagacttcgcattcggcagagcagacctgcccagtgagcgtgtcattttcaaagccgccataccaacgagcaacttgaaacttttgggcatcatcagggcagtcgatcacttgcgtgagcgcggactgacaagatgacggaagagtgttcagcaagtttgcatcatattggtcctcatataggtaaaacccggtgaagttgcgtcggcctataatatcgttctcggcacggaaccaacctagcaaagaggaagtgtatccgttcttagcatctctggaccagatcgctgtttcaccaagggggctaattgattggacaattgcctttgtaacaagattgaccagccaaataccactgctttgctccacatggaaccctttgtcttgacagttgttcgtttgcaagcaaccctgagagtatgacctgaaccaactatagaggcctaggaaggaagatttagatataagcgcatcatcacaaaccggttcgaaaatatataaaacatacctgccccaaggatagagatagattccgagtccacaatcctcactgcccacgagctagtgcacgtatcgcaatcaacatcctcgggatcatcagggaatctcccaggcgtgaaaggttctggcattggaggactaggctggaaataaggcgattctgtttgaatcatccccataaccaagtcctttgctccagacagctgatactggtagaaaacactatgctcagacgctgtaccatacatccacgtaggtccttggctttccacaagaatgcctcgtgccacgtaaatatcgatctgatcctgtgaaatcgcgtcaagatcgtggtctgcaacccatgcccacatattctccatataagctgaggcttgtttggtaatgcgaagcaagagcgacccggcaatacaatccttacgcagtgaggaagctttcttgggacaattttctgcctggagatgggaccctatagcgccacccacgcggaaatgagaatctttttgatattagcaaggctcttggtatagggagtaacctacgtaccccaaattccggcagatccttgagtggattcatggacattccactccatgagaacagctcctgctgtaggcccagatgcagtaaacatcatattttgaatctcgagaattccaacatctccctccttgccaacttgaacagccacacggggattctccatatcctcaaatctgctaccagttgccatgatttgcggccaagcctgaccaattattcgggacccgagtggtacatgaatggtatccttaatcgtatagactccatagggaatatagacaaccgaggagatattcgccgcaaaggccaaaacactgtttaaagctgctgtgtcgtccgtgactccgtcgccctttacgccgtaggccttcacatcgaacacttgtccaccacccagatcgtaatactggggacggcgcctggtgaagaagttaaatgtctcaccagcataagacttacttccagttaacgaccttttgcgactgatagatggcaattgagtctgttgggcgaaatgaagcccagtatcgtcagcataaaggccaaacccccaagcgtcaaccatgacttcatctccgccagccaagagaggttcagtacgggtatcggcaataatggccttttggacattgaaaaagcccacgttctgtaaaagaactgctgtagagttttcctggtgtaaagatgtgcggataccggtcggtgtgttggctatgatagcatcaactaggatataagaaccaacagactggccatcacttgttggcccgccagcctagtaggaattagagaaatatgggaaaatagaaatagcaaaacggtactgacgcctccaacgacaacgattccagttccacacgactcgatgacgacatcttgcatcgtccatgcccagtcccagtgaacctgaaccgctgttttgcagttcacgaacactagttcgcttgtggtaaattgttgattaccaagatatgcgctgccttgtgtcagatggcagcttctcgggtgctgtgttgtctgattcttacccaaaatttccacccacaaaggtaagattgcccataaagcctccgcttccgttctccatgtagataccctttcttgcatcagcctggacataaaaaaatagggaataatggtgatgttacctgctgcgtatttccatctgcttgagacatatagaagtctatattctcaagagtggttccctgagcgacttgccaatggatagcgcagacgtaggcgttagggtcagtgtgggtaatatccatcttgaagttgcgaacactacgcaggaagttgttcgtattcagatacctgaatatatgtatggtgttagaatattttatattcaaagcatatatgctcgtcttaccattcctctgaatctgcaacatagacatcggaggtgatcacgcctagcccaacgaaactcgcagcagcaaggatagttgggtagtccatgggctataattggcaagaaagggtcagagccagttgaatcaatgatggaaaatggcaggcatcttacatcgccgaggaattgagtgttgtagtactgtataaggggactgctgatgagataggttccaggaggaaagaagactactgcgggatagatcgtactggagccacaattgactccacagcggccgccatccgagatcgccttattgatcgcaacttggaaattaattagagaaacaatttctctctactgtgagatggcgggccacttaccagtgtcatcagtcacaccatctccctttgcgccgtagtctttcacatttctccagacctgcgaacagtttaataaacttcccacgcggatataaattgagacttgatcaccttgtacccgcttggagcgaatgggctatttcctctctgttcgaggtttgccagccagtagttggaaccagaagtagcacgcttttgtaaactagcctgatgggggccttccgcaatctgatactctattccattatccgcaacgtactcaaatagtccattcgcatactggagacgctgcggaggcctgttggtgtcgttggactttgttccatattttgctcgaacctgtgcggacagggctgcctcctctccagtagaaggggatggtggtgaagactctgctagcacacgagcagcttcggcaagatcttccgggatcgtgtaagcaaagctcttttttgttgcggtgcttattttgtcgcggcgtttcgttggagaaccagagcgggaagtattcgcaacagaaacggaaagcttagccacggcatctttcgaataatccaggggaggggcaaactctcttctctcagagcctttggctgtatcatccagaatgtagttgttgaaattgatattgtcgatgcgcagcttattgatgactgatagcgcttccaaggcctcagagactttctggacagcagcagtatctccaaggtggttcatattagcggccggggtagatttcggtatagcagcatcagtggcagcaatttcatgacgtccataatgtcggtgtaaatgatcatgtttatggtgtccggcccatacagcagtgatttgacatacaagcataagccaggacaaggctgatatagtcccccgcattttgacagcaggatcttgagatatgccaccaagttttgaaactcttcttggactcagcgaatataaagagtggactgttgaaagataaagaaatcagacggtactgaaatgcaaactacccacggtgcgctttcgcaaaactgttggcgcttctaacccaattcatgtgggaggttacatcgcttgcaatagtcaaaagggtggaaatgagatgtcttggaatttctgcttagcgaattcaacgatccacatattacgacttcataagtcgttctataagggattcacatgcacaaatcccggcataagatccaaatcagaaccgtgccattacgttcgggggttatactaggcaaatatcggcatataatcgaccggtgaaatccgtgcccgaaagcgaggagcgaatttctcaagtaatgaaaaagaatgaatggcccacaaagcataaccggctgcctatttctagtggagggtctacaagaaaataagacggtttagcgaaagagtccagtttcggaaagaccgaaatatattcctacgcttgaccgaataggagactaagactaatcctaagcgaggtcgtcattggccaaagttaaaccagcggccaagaaaaatgggagaaaggagccaagaccctactgaagcaagtggaagacccactcagggatcctgatggtcggattggatatagcgaggacccaatttcaatgactccatagaactaggaacaaatactacactgctattccagtagcaggactagtagaaaagaagcgagtatttagcgtaaatggatagcctacacaagattctcatgtctcagagggcaagcaccccacaaaaagggactgagagatcgggccctggtaaatgtataaagattcatggtttgccaaaattcaatttcgtaaaacgaggttctcaaatcaagatgttgggccgatacttggtgacgctcgtcgctttgacatgtgtcctcttgataccggttatagcacaggactgtaatgcggatatgccttgtgctactggttgttggtaagtccttgcctagtaacgtgggttacatgcttggtattaattcttcttttagctcaaaagatggcttctgcgggacaacccctgagcattgtggtggaggatgtctcgcgaactgtgactataaacttggatgtgatgcaaataacccctgcgaaaaaggatgctggtaagggattccaccctgtcattatgtcggcattccataattctgtcaatctcattgtggttatcatatcatatagcaacaatttcggattttgcggccatgggccagatttctgcggtaaggacgtttgtgtgaacaattgtgaccgcaaatcggaatgtgaccctggcttcggatccgagtgggcggaaagctcgacttgtccattgaatgtttgttgctcggaatttgtaagtcatcacatcgtcgggtgtatatgggttttggcaggcactgacggttattctgaacatgtaggggtactgtggaacaaccaaggaatttgtaagttatactaaaccctgcacttaaccatccgctatttaggttaacagtgttcggtctgcgtatagtgcggaaacaagactgtaaatcacaaaacttgctcaaaagaccgatatctgtctagagtggtgggctactatgaaggatggtccactcggcgcccctgccataggttctggcccgaacagatcccacttggcgtctacagtcacatcaactttgcgtttgccacgatcgacccggaaacatataaggtcctgccagccgataacagggataaagacctttataagcgaattgctgccttgaagacatacgatcctaatgtgaaaatcctcatcgcgttgggtggttggaccttcaacgatcctggtcccacggctacgattttctccgaccttgctgcctctgaaaccaagcagaaaattttcttcgaatctttgatcaatttcttgtctgttcatgactttgacggcgttgatttggactgggagtatcccgaagccgacgatcgcagcggaaaacctgaagattataaaaacttcccgaccttcatggagaatctcaggaaagccctagatggaacaggagggcgaaacaccctttctatcaccttacctgcctcatactggtatcttcaacactttgacttgaaagaattagcgaaacatgtctcgttcttcaacattatgtcctatgacatgcacggcatctgggacgaaggaaacaaatggactgggtcttatctcaatgcccataccaaccttactgagattaaacaaggaatggatcttctgtggcgtaatgacgtgaaccctgatcaggtggtgatgggtcttgcattttacggccgcacgtataccacttcggggggttgtgttgagcctggatgcgagtatttatcgggaggctttgccggagaatgcagccatgaaactggtatccttctcaacaacgagatcatggacattatcaacaagaggaatctcgagtccaaactatacaaggaagctactatcaaggtcgtcacctgggatgaccaatgggtttctatggacgataaagaaaccctgggcatgaaggcagatttcgctcgcgagcaatgtcttagtggtgtgatggtttgggctatcagccatgacacaccaacggcagacttctctcgggatttggcaaaagtgtctaacagacaagtatccatgcaatttgataaaatcgataacgacacggtcattgagagaaccgaccatagccaatgtcgctggacaaattgtgcacagccatgtccagcaggatggtctatgatcaagcgagcggacaaatggaagacatacgagggtgagccaatgatggattccactttttgtttgggcgtcggctacgcctcattttgttgcccacctacatcgccccttccaaagtgtggctggtatggctacaacgatggtaagtgtaaagctggttgtgaggatggaatgctcgagattggctcaaccaatgagggatgccagtttgatgtccctcaacagtaccagtcagcttgctgctctcctacagatgacaatggaaaagaactgagcagtatggcgctatacaacacgtgcgaatggtctgaaccacttgtcctttgcgacgatggtaagtgctcaggcacgaaagataccgtgttggttgaatcgagccgcggcagcggcgttacccattgcagtgcttggaataacggtgaacgtcaccagcacaaacgcaaatactgctgcgatgcctcgagaaagaacaagaagttcgaaaactgtgaatggcatgatggcagtgacctgatccacccagtcacgtccgacatgcgttgctggtctggttgtcccgatggccagatccgtgtagcaatgaacgatgatggcaagtgcctttatggtggtgctcgggcatactgctgcgatggcaccgactacaccgagacagaacatctttcggacgaattgcaacagtttcaagatgagctaagcgattggatcaccaatgcaaaatgtgagctccatctcacgaaaagaagtggcggcctcgaggtccgtgaggatctttgtgagattgttgcgaagcattctctggttgtcaaactagctgcacttttcgctggctacttgaatttgagtggaaggacaagccactacaatcgcctagccaatatctggaactcggtctctaatacattcgaacatctcagtaccagatacatgcttccctggattacgtccaatcttacatatccagagttttatcgacagggctacgaagacactgcaagacgcattttgcaagtgcctgagtggtacgatgagatgattgctgattctaaaggcaccattttctgcacattagatttgtgcgaatacggcgatggcatgtgtgatcaggatgaggatactttggggctggtgcgccggcagactcagtggacagaaaaggttaccaatggatcaccccgtccttttctttaattgactaacgaatcttacgctttccagagagatgtacttgtgctgctgggaaaacgagcaaaggcaaaaaaggaattcattgattgcgaggacgatgataagaccaaaacgagagtccactatactcgatttgcatatcctggagcaagcgagtggcccttgacatccgttcaagctcgagaggccattgtcaatgcaaaaatgggcagttgcacagaaactgaagtgcgcgaacaggaagccactgaagcggacctcaatgcaggggaaaacaatagccctccgaatattaacagtaagtggatgtctgtgaaaataaaagcaaaaggccctatgaactaattttagtggcagcggagcacctcattgaagtaaaactgatggccctatttatgcaatgggctgtcaaaggggacaattgtgctgttgactgcggtttctttgctgatttcttcactcaagaggttatcaacggcgcacctcggacaccaggaagcggtcaagacctcaagcgtcctattgatcgcgtcatggaacagtttggaagcaaatccaataaggaagtattccgactgctccgacagagtatcaatgtgatcaaaggtgatgtaagtatcatctctttccgctgcaaactcaccatggacaagtattaaaacaaatcatgtttagctttggagcttaaatccagttccaggaaatccattaaagtggccggggatggtccaggatgaggatcctcgcaaggcattgactctaatacgcgatgtaggttgcttcacaacacaaaatgaaagctacatgactgactgggatttgctagactattgcggtctacaactaccaaaacatgccgagagtcttagaacggttcaaaatggtcaacgacggcattcgcagtgaattgaaccgcgcagcaaaggcatataaagcacagaagggcaaggacgtcgaccttgcagactgttgggaccggtttttcaaacagagaacgaataaaatgctagagacgggtcgcaggtttgttaacaccgcgattgagcaaatgcgcaataaatggactcacaatccggaggctagcgttatgtggaatgcccaggctcaggaggtccgccatgctctggaaactctggagagccacgtgggagagatttacatggctgatctcgagcttgaagaactcagttagtctgccgataagtatctaaacaatttctatcacaacatgtatatttttgcactaaatatacgaatgatccagtttgaaatacgaagtttgtgatggaccagtcatttgtgatgttacaaatcaaacacaagttacttgactatcctagatgatagatctctgaagctcatgatactgagactccgtgatcgtctcttttctcggctcgctaggatagcaggaacgagagaaaagatcgtaatcggacggacaaaggaaaacgtcttcctcctcgacgagtgaagaatgtccatctgtataaatcactttcccaggacgttccatcccccagtctccccattgttgttctccagtattcagattctcacaagacagagcaaactggaagacagatgtcagacaattcctgagcgatccatcgtagtgctctgaacactcattttccgggtcgtgtggatcaaaatcacagtcaatcacgttaacgtatccgaccatactagacttgtcatctggatctgagctcgccaaaatcgaccgcatagagcggtcatccaagacaaggcagtagtcaaatcgaggtataccgagcccacgatcgaaagcccggctttctacccattgtatgtgtcgtttgcgaatagcatcggtcgaggctccttctaagtttggatcctgaacgataacatttcgataaccctcgtaaacaaggctatggacatcgggctggaattggaactcttctaaatctctgaatgcagccattgcggcgtagcagtaccaattaagcttcgcgatcacggccgcccagtcctgatcagatgtggttgtatagctcgtgcgatagataacatatccccatggccaacctccggtcttcacagactggaaccgaaaaaaccgagggatccaaccattccagccattaggccatcctggttttgtactgaatcgctttcttctctcaagagaggtttcctcgggtggaaactcggatgatcgccacggcgtaacccatgactcgtcgtgaaagatgtccatgttatccgacatgactcttcaggtatcacagaatgaatccagtaggcccgctatctcgcctaatatggttttgtctgttagagattttttttacgagcgttcgctagcccactagcgtcttggcgactgagtcgttcgcggcacttactaaccctctcttggtatacacataatgaataactggctaaagctctaactagatatatcgcgatggcattatataagtttatccccctctagtcgttccaccttctctatctccagctggctatcaatttagacgccaatgcatacaaaatacttaacccacaagctagcacatgagcttcccaccaacggattccagttattgaactgcgccgccgtgatcccgtacttatgctataaaaaaaactacactaaagggagaggggggaaatgggaggtttgaaccaaaaccgtggtctttcgacattcaaaaggaccattccctcctttgtacatcttgaacgccaatgttgaccattttacgatcatatttaaccgagcttgcccattcattcagctaggaatatccatctagccaagacaatggcgagaatttcaaaacaatcaaagaacgccagcgtggagaagaaattactgcaacagaagagaggccggcgcaagttatgcctagagaaaaaggcacgggactatagcaaaatgtgcggggcggaagtctgcttgggcatacgcattcgacaatcagggaaagttttcttatattccgcaggcgcctccgagttctggtcgacactctgctctcaattagtaagttcaggtgagaatgggagatcacaagttttctagctctttcaggactcttactatccaaggccagttgagaggcatgaaaagtgcctctaaacgcaacactttgatggaccattttgagcggttttggcggtcgggcgggctagcagcgcatgtggagatcagaccccgaagatccagcgaggtcagatctcacgccctcaaggataaacaagagcatcaatcacaaggactatggtcaacttttcctgttcaaaagagcatagggcggagaaactcaaatcaacaaaaaattgtttgttttaaaaattcactttttgcatttccacttgtcgctggatcatattcgctcccatagatagcaacccagagggtccacgcacccatagttccctagagcccaaaatgtaattatgtacacatttacaagttaccacaaatcagtctctttccccgtaacgtataaataagaaagcagcccatatttactgcctattgatcaacaaactttcgatcatgcaagtacacatgtgaggacttcccacatgtgtaactcaagttcatccaacacatagatcggtcaacatagtatgtaagatctatgtggaattgctacacatgttccgcctactttacctggaaaaaatcaaggcattcctcagtcaacgttaaacttgtctggtgttcttctgaccctgtcgaatttcgtggtggtcaaaaaagcttatggtgggacctattgatggcgctcatgtaactacaaggttcctctgatgactcacatactgagcaagggcactgaccaatcattggagttctctacgcgcgcgcgattgacggtgatgcgggccaaccctttttcacatgcacgctgacttccaactcaagcaatagcaggactcccgatggacacagcacaattttccaagtgcccaactagctaggtgatcatgggatggcccacagtttcccaatcctttcagtatccctggagcattgccctctctggataagtggttcctgcgacaggccacagtttttcctatatgcggaaaccccgtgccgattgagtcgcttctccgtatcctatcggctgtccgatcgtgactgggcgcaagtacatgatgtggcgtaacgctctaccaagaaacactgtagggttcctagcaaattcttttgcccaagctgttactagaccataaactccgtctagttattttatgagctgacctcagagaggtagagaatcccaagcatgttacatcgacaagtcatactgcttcccgttttcatatagagaccgttcccaaaaatatttctgatgcctcgaccctaccctgctcctcatatcggttctgggtcaatgatattcaatatgcgagcgagaccttaatttccctctggaaagcctgtgaatccaaatgagtagcgttagtccaacatcaagaagatcaaacacaagtgcgcctccaaaaatgactgcatagtacgtccaggccaatgaacccggcaaagagagaacagtcacaacgatggcacaaggaagcatccagcataagtttgagccgagtgcttggtatagataccacctcggccccaagttggtagttgagtccataaaagatgtaggtccagtcaatggcctgtaaaatgtaagccaacgggaaaggaaacatcattctctctgcagaaagataccttccacattctttgggtgacagccgccacgtcgttcgaagcagataaataaagagcgaaagattgtatcccatgcacagatagcgcaatgcacacggtagtttcgaaaaccatgacaattccgcaggataaaagcgctggtcgaataatagctttcggaatgttaatagcttatccagacctcgtaagtttcagacgtaccgaaaacttccgctctagtggccttagggtattctatttgctgtgttgctcgaaaacggccccaattatgcccgacgaaagccaacgttgacgcttcaacagcctgaacagggaccattatgagcccccagcggattgtggtaaaaattccccaggccgtagcatagagatctccaagctgaactattctgttgactagccataaatagatggaattcctgatcgccgactcggcgaatgtgtataaacttggccgaactaatgttttcagtgcatcgaggcttattttcaagtttccgtggccatcggcttctcttttcttgcgcttcacaaccacacaaacaaagtaaagaagtcctaccgtcaccgataatatgtcgcaagttagtcgaataatagcctgtgttacaatggttggcgtatattttccaacacggaacgttgatatcagtaggaaatctaacacgatattgatcaaaaacttgctcgcgttgattatcaaagggatgtccggtttatccagcgctctggttgaggaagagatcgccgcttcggtcgcggatgtcaggccttggatggaggaccagcgtacataggcaagcgaggcatgtcgcacttcagccgggacaaaggcggctgcaagcttggtcgacgttgcaagaaatataacggtcatcagaagcccttgtgctgcacagacaatgatcatggtccaggcaaggttcagccgtgagtgcaggcttcgcgatgatttgtccccaataatcagccacgcagaacgcggaataccatcattcattacctcaacaatgatgccgatgtatgtgtatacatcagttgtgaccacctcgctggagcttaatttggcgacccatagcttgcttagggtgctgtaaacggcgggtggggcgaaggcaagtaggttgaagattgcggaaccagtaaaacttttaaatctgcagtcagcatccatcttcgatttcaagactgacatactcacgtctctcggctccagaacgcgcgtgtcctagatgaaagctcttcccctctgctcctcccttcgttggattgatgagcagcttcatcttggaccgttgtagatgctgcgttggcccccatgttatcttcttcccttttggtgacttacgcaacgcataaaaatgaaaagaggatggagagttcccaggcggtgcgttcccaagtctttgccgaggcgccaaagtgaatgcggggtccaagaacgtacattgctactgcatgagactcctttaactgacctaaatctttcggcctgcattgtaactgtatctcaaggcatgatatgtcacggaaactagaacttgacttggacattgtaagcgcgaggttggcactctacatagcttcttgcgagcctttcatacatgcattttcccgtggagaggcgaaagaaagaggggagcaggcgctaaaatgtggctgtggtccagagtgcaattctacaaggacaacagagccaatcatacttcagcggtacctagaaagtcacgggacccattctggagccacgtgtagtcccgagtagagactagggcccagttcggagattcattgtacatgtacagagacacatgcaaagtggaaactaatattgtggtattccacgttgttgtgtagcaaagaatgaattggcgcgtctggagaggatgcatgatttgttgcttgcaaaggtttcccagatcatgtcccagaaaacaatggctttccccgacccaattcagcttagcgcgatctgagtggggcgctgggagcgctgggaaatagagcgtgagtgtcccgtatttgtgtgagacctcgcagtcgcccatattagatgacggttctcagctagacagccacgttgtcccagtgaggattggttttacttccttaccagcttgctgtaggagcgggtctccgcagtagctttcattgggcgacaatataacagcgctgcggacgctagacggtgactgaaagcagagccagggcctagccgataactataaagagccagaggaatcctcttctgtaaaaagaatatcgaagaaaatctgtgctctctctactatcttactattgaaccgccttgatatctttctatctctgaatactctctacataatgcggtcgcatatcataattaagttgcccgcttctcaggttatatccctccaaatcctcttccccaatcaacagataaggcccgacaatgcagcgaagcagaccaagagatacaatatggtctttgttttcttaacttatcggccggttgggaggctggtgggcgagaagagatgagagcgcaccagactcacgatgcacttgtacataatgggacttctgtcgcctcactcttgcgccccgtctcaaattccatacgatcgaacaagccgcgccgccctcaaggcagcgtggggcgatggagaaacggctgcaggagctagagaagcaggtccaagcttacgatcggcttctccaggtctgggcaatatttcacactttggctgccagcaagagtagcttatgcttcgaaacatgaaatcttgataatgatctcggtgggtggatcaaggagtggcgatgaatacgttccctggatgaaacttaactaataatactttagtgtgtttcgatccaagctcctgaaattgcccgtgggggcgaggagtaagacttgattgtctgcttgacttttctagggccttcgatcaaaccacacgcactctttttgacttctgttctttaggagcacatcgtattcgcttgagagagcctgccattggtcggtgaaccaagctgcacccatggaagccaatgattagggcccgatttagttcagcattccatggaatattcccttgtcgaagatcctggtggaaaagagtttatctccttcaacgaccgttctatcgcaggacggagcgacttctcgggcttgagatggctcaaatctccaccaccccaacccataaggagcatgtggcgtatatctccagcgccatgtagaaagtagacgttggccaggtcaattactcccagaaaaactggaatcgctgatccttgtgcgcgctgaaggatacggtaaatatccgctcctcacgacaccggttgccacttccctacccacactcgttgtaatattaattttagctcgcgctagcatatttatggcttgattgaagtggccggtgagatataaaagcagaatggattagttgtcgttacattgtgatgctgccactacatccaggagtagtcagtcgccaacggatcaggcagctttcactgtcctgacagaaagaattagccaaaacatggcaagggccatcagagatagcttgtagcttacagtatagagggatgaatgtaactagcaagcacgacgcactatactggtctctatagagtacggaagctttttggcccgcaagcgcttcggaaagtatatcaggttctccctcacccaagccttgcaggaaaaataagacgttgccaggctgatcttaccattgcttcgccactacagggtaccagtggatgcatgcccattcgagattgttgttcaagcgagcccgccttgtctgcggagtggcacattaaggagaaatctcagctgtttatatgtggccccgaatagcaactgctgccaagagccagagaatcccctatgctggtgggcctcaatggggagcaggaattattctacatctagcctaggccaccaaagaacatgttgatactgctgcttaacgcggatgtcatgcggatggaaactagcatgcctcaaccactcccagtggcctacgaagcccaaataacgacgcccaccctcaactcaagcctccccgcccacttaacagtgcaatacaagcacggtcccccagccctacgaacaacggccgccctggcaacatgcgcacaccacgcccgcgcgaccacttcggccccgggagcagacgcgttgataataatgatctcctcttccacagactccggcgttacctccgctatctcattcatcgagacgttccggaacctgtaatcatcaagttgtcggcggtggatcttatggccccttgcttgatcggaaagcgagcagggcgggagggtgataaagacgggggtatggtccaaggcgaaggtgatttccttccccgtcccgggctgtctgaaagccagagaagcgctccagagccaggtacccccaggctcgaactggtgggagcgataggcgcggcggagatccagcgagcgtagttcccacgcggcagtgtcccgttgcggagggtgcaagttgaaaatctccggctggtttgtggcgcgccagagtggcgcaaggtccaggtttcccgcaatgacgatgtctcgagttgactctgcagaaggcggggggagcagtgcagaggccgggttgaacgccaccgtcgtgatgaggcagtgtgccgcgggggcctcctcgtccgtctgtgtgtgcaacgttgctgctgggcatgggccgacccagccgttgagcgaggtgacgccaggcaggcagccgaggacgcggccgaggactgagcggctgcgccagtagctgcactcgggcagcgcgacgccgcattcgctattcggcgccattcccacgctttggattgccggcgtgctgaggaccagcatggccatgaggacgtgtgcgaagtgcttgcccgggagcaccacggcgaagagccagtccacctggacagggtaaatgggttcgtgcgacgcaagccagtcctcgcgggccttcttagcgcaaagccggacggcttcaaggtacggccactgcatccgctctgcgaagaggaacagcccctcgagctgctgctcgtccttagccggtcgcggcgcgatcgttcggcccatggggtccaagtctgcgattctccgagcgcgcatgagcgccgctttttctttctcgcctgcggcttgctcgattgccttcaactccgcgccgagcgcgtcttgtgctttgtctaggtcctggaggatcggtagcttctcgtcgaatgcgtgtgcgaggggcacggcttcgcggaaggcctcgcgcgcccggagatagttcttgtagcccaggcatgccctgcccaggaggacataccccgccggacgatccgggtccagtcgctgcagtatcactgcatccctcgctgcatccctgtagttctggaatctgagcagccactcgcccctcgcctggacggtgtcgtagtttgccggattaaccgcgagcgctttgtagaagaagaccgcagcacgctgaaactgcttcgcctcggtagcctcctccgcgagacgaaccagctcccgtgcctcctgccgatcctgttcgggtacgccagccgctttggcatcctgcacttcccgcgcgagcgcgccatgcccgccaacgtggatcctcgtgtttgcaacccaccgctcgctggtaatcaacgacgcaaggatcgcacgcgtgaaacgagcatatatccccttcgtacccccggccccttgcatccccatccccgcccccgaggcaagccgcagcgcgagctccctcgccataaccatgcgcatccggtcggcccacgcgccctcatacgagccctcctggaaacgtgtcatcgtcttggcaataaccgagcggcccgaaatatcctcctgctcgtggtgaaacgcaaacaggaattcgagcacgcgctcgctgtgccccatctcctgcatttcccacgaccccgctataccctcccacgccaccttcccaaccgtctcaaccaacgcggcgatttgctcctcggggtcatcggcaggcacagtcccggatcggatctcctcgatcctgcagagcagcgtcgccgggtcgaaagttaggtcggggacctcgaggaggaggtttgggtgtgcccgctggggcatccggccgtgtgcgagttcggcgttccagaggtcgaggccgaagccctcgactgtaaccgtcccgttggcatgggcgtggtcgtacagtggtgaggcttcggggtcgaagaggatgcagtcttcctcgtttagctcgtttgggctctcggagtggcggcggaggtatttcctctggatccggtagagttctggtcgcggttagctgtcttcaagcctatataatgtgccaggtagcgtagctctatataccaaacgacggatgctccgcctccacgaacccgtgctccgcccccgacatcttcatcaagccggccagctttccatatggcccgtccccttgttccttgccaaaccgatgcacatccaccgcgatgcgcgggcgataagcggtcgcaacctggatggtaaacaccaaactgccctcccgttcgtctttgatgaacatccgcgcggcagcgagaccactgtcaacattcgcggcattggaattggctggcgcattcttccggccttcgtttggcgtcctctctgccgaggctgcggcgtctgtctttccacttgcattgggatccttcccggtccgacctattgacatcctcttgaatcgggctttgatgctgttcatctttcctgtgagatgaggcgtggaaagcctattgcctgaggtgaagtggaggagttactctgcgagattgttgggacgaccgtcctgctttaaggcactgcaacgccgtgcgctaatgcaattggatacgagccgtatgagaactcgctcatcttactgctatatgccgagagggccattcgcggggttctactggccgaaggtctgggcgggacacttggcagtttctgggcgtctaatcccggcgttggtgggatctatgtaagtccgtggtaagcgcagggtataggaactatctggtcgggtatatgtgggtgatagtagttattgacgagcattcatggacagagggggatgctgcagctatggtcttgcttctatgcttgattatatcttttgacatcaatattgacccgactttctagatattattccggctgtatgcgttctcatcgatacctcgcgggacaaatatccagcaacggtttgaatacatgctgcaaactgacttctgaaacgtgaaatcattccaatccggtttcggcgccgaggtagtaaatgtgcattctacttggacaaagcatatacgatgctatagttagcaacattccttttagtctagggagaatagaagttactccattttccgctcgatccatatatcaagcctgttagaggtaggttggatgacattctgaagggttgaagagcaagtgccagaagagtgccagaagagtgccaggaaagtgccaagagctacttacgaatcaaggttcgtgcatagtgtgatgaaccattggccaatttaccccggtctttgcatgatacaaatgctcctaggatagattcacagaaggtagcatttctcagtctatactttgtttgattggctggttaatgctagctgcctaggttttttttttcgtggtaaagataataccaaagctcctgggatgcattttgctctgccgggtactggtttgattggctacaaacgaccaggggttgctgcagctaaggcgcagactcatctgatctccaaacatcccactggttcccagattctatggttctgttggcagaggcagcctccgtgtgtaccataatggcttcaagcctaggtctgtgacagcgtttgcattagctgcatgggcatcggccttgcttgtgattagtcctcgatcttcttaaccacccttcttaaccacccttcttaaccactcttcttaaccactcttcttaaccactcttcttaaccactcttcttaaccactaacacccccaccctctacttgccactagatatctctgaatattatttgcgacgatgctcagtaggttgcttgttgacgcaaacagatgtgctgatctcaagaattcatttattaggtacgttagccagatttcaattttaagaattagagaaagccaaattaacatttcgcaaaatacattgtttacttttatttctcccccagcaggagattggactcatacggtatcaggttgtgcatctggtcctgaaaatttgcccactttacgattacactgacttggtctggaggtccatccagcctcacatagatagtctttgctcctaagccagagtagcgtcattgagtgtcatttagccgaccttcaatctactgaccatcgagggcttctgtacgaaaatctatttcacgattgattggacatgctatttttctgggtttggatcaatgttattagtcgatacagacacgtgatgaataatgattggggattggaaaactgaacaagaagtgatgttatacaacataatgaaggagagaaatatcgggaagtactcaaagatatacgtacacattcagactctttgtgagatttcacgcctaaactcaacaggtaaagacttccacaggggtagaatctaatagaagaaaagatgggaaagaccagtaccaatgcaaccgtgatgcttcagatcacacgcccttctcctgtcaaaaaaatcttttatcatgtatcaggagctatggaggctcgataacgccgaatatcttcatcttcttttctgacccgctccagcttgaagaagttgtaaagcgcaagaagtgctgaacagatgagaagagttactccagtaataacggttgttataatagccattaccgaccaatccccaccttgagatgtacagacattgatgacagtggtcagcagcccggcagcagcatgtaggcataggggtctagtccagaattagagttggatctggcttttcatacctctttcagttaggatttgctcacttacacaaacactttgttgatcagcaaggggtagtttcccctaagctttgggaaatgcatctgccacatgagagccgcaattccactaacaaaaagcaagcacgcaatggcgagtagtggggggttctgaatcatatgtagaacttcacggccggtcctgctggtttgtaacgtcttttcaacctggtttgaggtctgcaatgaagtgaacgtgccgggaatgaccagatagccggccagcagtgcccagttagccgcaccaaccgtgatactgaaacgcatgtccatttgtgcttcttccctaagaattttggcataggtagtttcgttggcgtgatgttcctggtaggctctacacagccccggggtcacatccgcagctgagcaaggcggaacaagcacagggtttattccaggaagtggggacttttccgatcctatcttcactggcatacttatatggttgttcacaacgaaggctatgaccaaggaaatttcagggttaccattggaagacaaatcaacaaagaactttgtcagttctttaaatagtccgtagggaaaaggccgctaccgtacttagtcaaactaggtctagcttctactataggtgaagcctcatttttgccttgcgataagccttgcatggtctggtttccgaagtcagaaacgaatggcttctgataaaaaaaatgcggaagttgttgcatacttgatttaagcggtcgtcatctgcgaatgcactggcggaaggaatcagctgtgggcggcggttgctgatatagcggtaacatcattatattaccttcagtggccattatgtctaggttcaggtatttgtgacaacatgggaatcacgctacgttttcttcggcggccaacatagatctttctcaaacaggcccactgatgagaagccagatccccactgtcaattttgctcgtatatacatagatatcttgaaacatgcaaggtggatagcatcatgtccattgatttgtgggcagaagggattgaacattgaggatcataagctcgctacattccgtgacgctctcgcggcagctgccatacgatgtacaaatttccagcaatatgaaacatgtcgcgagggttcggatctcagagtgtgtgccagtcggatcgtaaaccctatcgaatcattagcccacctggaccaccgccaaggctaccgttatatcttacctggtagtctctcgtttgctctatccgagtcattcgtcaagggacggcataccgaaacggccagctgctcgatcgcatgaatcaaatggcgaatctttgtgcgggagcctttaggtatgaagattggaagagatggtaagcaagatatccgagcttcttcgtgtcggacaaaagccgaaggttgaaatgatcccaaaaatgtacattgacgacaggcctatcattaggatcccgtatgcaattcgtctcttgacaccagaggccacctttcttccttagcattgcgtacgatactagatttgtatggaatccaggtgagtatagagtatagagtatcactcaatgtgatctccttccttcctttcgctgggtgtcttcctactaggcgagctgtacccctgccgagtatctttgtggtgctgtctccagttgaaacttctatatcgtccggggtgaagtcaacaaataagctcctatcattacagatatgcgtactcgatccggtatcgagaatccatcggtcatgtagagagggctcatcactttttgctacagatagcacatgctcgctgatctgtacggcttcatgcttttggtaggtggtggcaaagctaacctggttagcatattcagcctttggctgagcttcagcaaccaccttttccacccattgcttccaggcgaggtcctttgctaacttctttttcgctttctctagcgtacgctcattgagagtgtatccctccggtcgaattgcttcattcatgatatagcaagtagcaaccttatgcttcgggtgagagctgccacagggacagcgtctcttttcaaatgggagcttctcttgcttcacttccggtttcgcttcttggtgtccttgccaggttgaaaatgcaccttttggagcattagttgaggtcacagtttgaacacctatctcacgattcatagcgcggaatgattcgagaagatctcgagtatcgtacagtacaccttcttgtccatgacaatctcctggtatttcccttgccaccagatagggagcgcctctttcacagtgtgtaggaaatccctatttgcatctccatcattgatgccaaggctgacggcttgctctcttagtgagttccactgctgaagccattcctcgatatctcctgtcggcttctgcattgcaaagaccttccacttcatacggatttcttcttcgtacgcagtcgatcgggcaaagcgagacttcagatacacaagcctatcatacggagtacgatatgcaactagagagagacggtggattggatcaaggtatgtgaggatatattcatttacatcgctcagtccctttgtctgcttctcccaccttgtgtacttcactttgtacacatccatacggtctcgccagatccttcgttccttctcatcgccttcctcggggtattggggttccaccggttcttggagaggctcgggccgtttattagagggatcggttgtcgacgaggtgaggtctggattacagagatcccacacattcttttgtacggcatatagctgcacctttgcaaaccaggtgagccactgcggcgagtccttcagtttttcgccctttgtggcggagaggaatgatgctgcctccattactggattcaggggtagctttgcacagcttcagaatagcttcgggggttgcgagacacttctagcagcgggctagatactgtattccaactacagtagtctcattcagtgcgaaccgggctcataactgtcggcgtgggccgtattgtaaaaatgtagggtccaatcaatggtgttcaactctctgtattgctgtatcgacttccctaacaatttatacgggccgtcgattactaatctaaaattacaaaatgcataggatcaatggatcctccggtatgccggtatgccaatgcatctactccgacatattctgtcaaccttaggattcggccccaaaagatttgatctcataatttggctttttgatcgtcagggttccgctcggtattgagaaagtgaaacggccttgtgggcttactagtctcactctctaacaaagccatgcaaactcaatattattcttaaatccgatcatcttccagaactggggatggttggaaacctacaaacatagttatctccactaagggcgggcctactatttttgcacgttacatgcgtgcagctcttagtactatgtaagacatccagtttcaggttgaagctctcattttgacgcagctactgtttcatgcagagaactcggtatcacggtcacacctatagaagagctctaaatttaatataaatagctgacctagaatcttaaacctgtttgtttttcctaggcccctaaagtttttggtcctgcttcctggctctcatttcttgtcattcaccatgcttctcactaaattctcatctcttctattgctggccactcaagctgccgcacatggcctaatcacccgtatcatgggtgcgaacggtgttgagatgccgggactaacaggtaacgggttatcgttgagccctccgtattttcaacattggttaatgattgactctagttgttgatggaacgccacgcgactgcccctctgcggtgtgcggtgggcagaaagataccgcagtgatacgagagcaggaaatgggaagtatcaaggcttcggctttgggccgcactctaatttctggtcctgtagacccaaagagagtaatcatgaatttcatgacacctaataccgacacgcggggtcacacccgccattttcatcaaggtcttccatattctcgcaatattaaatcctactccgggtactaatgtcttttatagcccgccaactgatcaacgacgcggctagtgtcgtcactaatgccggcggagctattctgaatggttagtatgtgaatttcatgacacctaatcccgacacgcgggttcacacccgccattttcatcaaggtcttccatattctcgcaatattaaatcctactccgggtactaatgtcttttatagcccgccaactgatcaacgacgcggctagtgtcgtcactaatgccggcggagctattctgaatggttagtatgagcgttaaattttctttattctgcacaaaaaaaaagaagaaaaaaaaactaagctatctaaaggcgcccaggatgttgcagacaaaacgccttttggtggtgctatcaagggtaaaccctccctccttaaccaccaagatttggtgctcatgacatcaaacaggtgcgcaatcagctgttgatgatgtggcgggtactctaccacggacagaatctggcgcagttacgcccagtggcactgtagagaaaggggtcgagggttatgctggcaaaggttctgtcaatggattgccctctgtttccgacgcgggggtcatcacgatgacttatcatcaggttcgtcacaggccgcggctctactttactcaccccatgcttacttttccgacataaaggtaaaccaagacggtgcaggtcctttgtcggcggacatcgacgcaacgagtggaggtacggacattaaagcgttcaaaccagccaaagttatccaaaacattccaggggtcgcgggattttcaacctccagcaccatggattatgaggtcaaggttcaactgccctcagggatgaagtgcagcggcgttgttggtaacaccaaaaatgtttgcatcatgcgggtcagaaacaatgccatttcaggcccatttgggggttcggctgctttcacaaactgatgtgttggatcatcccagaagctggtagatgcttacagactgagcgctttgcctgtctgtctttgcctgtctgtctttgcctgacagcttggtttgccagtttctcggggtataaataccctgctttttccatagatctaggaatcaagatttctttcttctctctcattccatcttcatagaaatcttccagctaccggatctgtagctgcgtcataatgtaatatggaaatcactacaattttgaacacgttgatagcctactacatggtgcttgaaaccttcttaatcgcacgggctagaaaatatttgcatctagctattgtcatgaacggcctgtgatgtaagtggctcttgtctagtgaagggagatgaaggcaacggcttactatctgactccctgctgtcccctcagatccaaaatgagcttcactttcgcggaaattgtagagcgatttaatcttcctttaaattccgtttctgcaccaactacgatttcctatcggagtgggtcctcgaggaatcgatcaccattccctgtgtgatgccccggaaatcgacgacctttttgcggcgagactattatgaccggcctaaagtcattcccgacggtatgaggaacatggccatggtgggcagttcgtcgttattccttgtgaaatgtctgttagtatggactattgcgtgcgtcgggcagacaatagatcatcccatgggattaggctagagcttcaacgggtttgagcgagcgcattgcaatatatttgccggaaatatgcccctgaagcgccttaaaaagtgacaaccttgaatggggctcttttcttgtcagtgtcgttaaattcgaagtgcgcaggctgcttataggataattcgtccaatttccaaagccgctgtggcaatgctgcaatttactgtactacttaagacgtgatatatgtccctcctcgttatcgtagaagtattaaagtggtaggactctatgcaagagcaaaaagcaacatagaaggaattacatcccccagtggctctcggaaaatttgacaccagtcccctatttagatcattcccggcggagggctgcaaagagttcaagggctcattggcttccggggttgaaattaggatcttcgtcgcctgaggtctgcgtcaccgttaggaggcttgggattctttgcatgtgcgatattttccctcccagactgagcggtggagtaacgagggtctgtgtgaggagtgtcggagctgaataatccggagtctaggatgccgaattcgctgaagttgaaattattgaatccggaatcaagaagattgcttttctggatgtcatccgaaggaccatcgtctgaatcggcaggagagacataatctgaaggaagcaagtctgcccacttgtcgcccacaaagttaatctgctccccgattagataaaggagtttggctggccagatgcaccatcaaagatatcgagtatcatcccagtatggcatttgaagacctgcgaatgaaggccgtcgtggagcagtaaagggaaaatgtgttgcttattcggggataattgttgtcatttttgtgaccgaggaccttgctggcttttttggatatgctgcatgcgctccacggagggatggacaggtgttattggcgacctagtattcttcccttcattgaggcttggagaaatcgagggcagcgacaaccaattatgacaggagtgttgatcaggaggtgatgtcgacgaggagtcgggcttgtggtgggggggggcaactcgaaatcaaaggttggactcttgaaaagacggccggggtcatcatgtggagtgattgcatgattctccttctcatcgtcccgcttgtcgtgaggcactgcgagcgctgcattggggagaacagcttctcacaaataagacaccaatcaacggccccttttgagcgtttggggaaagcgaccttcgcacatgctttggggcgaggcctttgttatctgttctcgagataagtcgcacttccatattcctcgccatattagattagaaggcgcgctgcaggtcctccatcggatgctgctcatgtcgacgatgttcggccgtataagtaagccggcgcgtctcggcgctaatttctcggtgttggttgtctgcctctacgtcgtcgccattgtcatgggtactgctcatactaggagttactcctttggttagaatgaaagacaactcagtgggctccggagatgatgccaaaggcttgttggaggcagcctacctccgagttctgaaagcagggcgggaactgaacgggccagtctttcggttcctcaatggacgtttttctttttctctagtagcttcttgttccacctgtttcctgggcgcatgttcttgaacctatagagccgggccacacggattgcagaagagcatttggacccactcatcgacggtcttcccaggagctttcctatagatcttgaatttttgcatctcatcctgggcgttgtgttccaaggccaaccagaaaagcctgctagagtccacctctttttgtctcttttgtcgggcttatgtttaccagccagcgtaggatgcgtctccaagtcataagaaaaccgtcactgttcggtaaaccaacgcgaccgattgggaaacaagtctgcactggcaaaagccaagcactgctatccacaagggagccaacgtggctcagatgaatatcttctatggaagaaaatcatatgctgctggtgtttggtgtgttttgtgttcaagtttgttgtcaacttcctgacaccattcaccatccgtccatcgccaaaggtgctggaacgagaacactccggctgaaccacggccatctaacaaccccaaaagcgccagagatgcaatcccttcctcacgttcctattcatgaccaaatatgatctggcagccacgttgctcctggagatatgcttcaaaccaattggtggcccgggcttcatgtggatacggtaactaaattgaaacatccgcgattcggtcgttggtatatgtaccgctattgaggcaaaatattggcatctttagtccttctagaagccgtcgttgacaatggtagcccgcaaaactttgactgtggatatatccctcacggtggacctgaccgcttcagccccaaacaattaaaaggttctgattgtccacatgatcgatgccctcgttgctccaataacttcatagtacaacacatcactagcaaggccaagcgatcatggatcgcaaacacagtggacgtacatggcaaactggcatcgctactttagatccccttctcgaggaatccatgggctaacaaatttacttcatgaagacaatgaatcggctgaaaacttccatcgggtcgctggccaattcatccatggaaatagcggccacacaagccaggttttacaaccgcctgttgaccagtccactggctctgtagctacaggggtacttacttccgttggtacctctcttgctagctcaggggcctctacgttgcctccaatcgtcataaaggctgaaagccaagacttggctctctgaatgcgaaaaagagagcagccgaatcctcaaccctcccacgaaagcgacgctgacattcattccacctctcaaatatcgagccgctgtcaacgggtgtatcgaaagagtctcccaatccttatcaaaattagtagcaaaacggttaacgatacaattcaatacccccaacgctatccgaccgtatcctctgtttcccggataccatgcattgtgcatgttatgtagcttagcctaattaaatacctacctgaagagatcaaaatgaacaatattgcaggggcggtcagagtggtctgacgaaggaacgaagtcgctacagtccgctccaggtcactattatttcagaaatatcgtggctacattaaaaaagccgaatgagtcatattatattctagtttcatacatactacaaaattttagattcgagaactcgctgtattggttaacgccaatcaccagcgcagaaaggctttccgggcgctttgaacgacagggctaaagattctatctatccaagatattcccacacactggaatgctacattcctaacgctcgaacgtgcgaagaagctccaacgagagttcaatcactcctgtcagctcgatcaagaggaatggtgctaagtgcttttgatcacaatgtctttttccgttacactaagaccttatcagactcaagatgttactcttcattccgtctgtatcatctataatgagctcttctgctaccttgataatgcagatgagttattaggacacaaggctgttccctgacaaaggagaattctccaggcgcctcgggggacgagaatggagctctcaaaatactgcaaagtttctgacactgaacagtttggtacaatctatgctattgcaacaattatatgtccatcaaaaaatcttcagttcttcgggggcgacaattggaaagtgaaaaatgagaagggaggacaatttccttggtgtcgatctttcgggttataattcagaaggaactcgaccagtgccaaaaacgtattaccccccaaaagaagcccttaaaagcccaagtctcaagaggtcaaggaacaggagcttaatcttatgatggactcgcacgctgcatgcaaggagaagttgaccaaacagaggatgaaattacacggtatatagcaaaggatctgtatacctccctgctttcattgtatgttttttcagctaagtagtctaatagttcttaccaaatgcaaaccaaaagttttatggaagatgcataagcttgagtatccagtgcttgcagcgatgtgcgtgttcaccgtccgacccagacccattactgtgtcgtacggaagaccatttagaactgaccgatcacttcttggtggctcccagtggtagcaagaacggtatgtggacgcagtccaccgatcttccattccccgccagtcaacacatagcacagctcaagataggcactggaatcccattcggctgtcttgccgtcggggaacttcctgacatgccgagctcggacctgccaatttcctatcgcttcggtatcattgacacgtgtgaaggctacactcccgagaaaatgttgggtttgcacttccaagtacattagtaaaaacaaggaatttccacgaggtgataacttacatcttgggtcaccgagccggtcctctcggaacgcgaaattaacaaaatcgtcgggagggcagtgtttaaccaccccaacagctgggtaatcggtatagtcggctattatccgcgatgtagcgatggaaataaaagcatctttatcctgtcatggcatcaattgagaattgtagaggtaaacgtgggatactaatgtaattaccctacctttttgtcccaggccatggcccatttatatgccagttcacgaaattttcgctcatctgcgatggtgtaatccattattgatgggtggtactgtgccctgcgtgacgatgtccaagtccaaaacaaaattgctgcctctatttatgttaaggttagtgcgttttcaaaatccgtaggagtcttctgcagcttacaccgacgccgtaggttgttcatttaagggcccataataggggtcatgcttccaaatgatgtgaatgataatgcacatggcaaacttcacctgccgaaaaacacggctattcggcatccctcgggtttatcggttggatttcggagataagcatagcgtctgctgttcttcctgacttggttagacaattgtagtcggttcagtggcacatttaaggttttagtatccagttttagataatgatagacaacgggttttggtgttggtcagacgccgagatggcacgctaaatgctgcatctgcaactcgagccctgccatgaaacttgatctcgctaccctccggttactcctagctaggttttatagccgagatgccgtaacgaagacctacactgcccagctccgtgttcagttatctgtgcttgagtttctattgttcttgggcgttcactatcagaggagttagtaagcggaagtacggagctttcccattttgccgagcagatttcacggacatggatgctgtatgtgggtccgccacattttttcctaactagactgaaagtctgcatcgcctctttgtagccccattgagctcgcactgggcagcagtccttgccaggccgttgagactatggattaataccttctcgtggtgtccggtgttaatccctgttggggagaccgatgtaatctgccaaggttgtgcggttgcggcccgtcgcggggtaacccgaccgcacaatcactccaaaatcaggggatacggataataaaaaccatccgacttatttttatccgactcacactcgagcccagaagctggtcttgcgttaccagtagaagtggtgtcgccctacaaataaggcaggacaccccggagcttgcgtacggtctggggtcgcatagtgcgagatgcggcgaggcggtagtaaaccgatgacacaggcagtcaagctgactttggacagacctcgctcaaggcccgggggccttgttagaagtcgaactcgttaagacgatgacattctgcacttcacacctcgttaaggctcagccacgggcagccttgggtgcagctgttcttcgagacacaggcacaccgagacacgggcatcctcctgggagatacacgggctatctggaagagggtggtaattggctggaggccaccgacgggcctcgtcaaggctttgccacgggcaaaccgtcgatcctgtttagacatcggggaccaagcttggttagtggagagcaaccgacatacaccgccggatggggtgtaattgagggcttcctgtaagtcacggtcggcctggcggagggaggcttcctcaggtaacgcgaaacaagggtgcgaggtcttgcggggcgtggtatacaatggcagccactgcgacctgggtcgcgatcgttgggaaagatcgtcatcatcacgggacgattgaatcgacgtgcccaggcacatggcgagagtcctgaattatcctgtagatcagggtcgctgccaccagaaagtagcgaatgcacggacccatttctgcctgcgaagaccgctaggtggagcgccgttcggccatgtttgtgcctgacgtccactctaaggcagggctgttctagtagttacgctcttgccagctgattatctcagctgcctcaggaatgctcggcagcaagatatcttcccttttcttgccatgtatcacttctagcatgtcctcggtacaatacaaggtagcaagcagaaagagagtttcgtgcctcatgactgatcatgtccatggatagttccgattattgttctttgtggtcttatgcatccattgcgagttgtcgctgggaggtccggccttctttcccggtgttgtatccgcgactgtgcaaatggaaacaacacgttcgtttatatcaaaaagttgcccagattcgacgcccaaccgaattcgaacatcattgcagaccacattgtatcctgaccacgggtatgatacccaatgcgcaatgcttctttatttctcacgccatcactatagccagtgacacccgattaaagtagtctgaaaaggccgaacacaaccaacaatccgggaaagtcgcgttagaacacgtaatcagatcccaactgcgcttcacagacagtattgattttgacgattaataatagctatgccatgcgaaatgatgttactcagctgttgtgcagtcggtttctcaatcaagttgaggtccatgtcgttctgtatatcagattgatgagtttactgttcccgagaagcaggactctcatctgccgttcacgcaatccatcattgttcaagtttggtaattttcatcgcaaatgtagacattgagacatgactaaatgttgtggctgctgtcttgccttcttggagcggattaagccaacatggtacgccctgtctaaaaagcccaggattataaaatgaagaagatgccgcaagaggttacgtgtacagtgagagtctttatcgaatgccatttctatcctgatctcgacagtctgtccgggttcaagtggacaggtccggatcctctgactaactctactcgggctagtgaggttttcctccacatgtcagcgctccttttccctaaagaggtgcaatggatagaatttcgatttgtgcgatttgagcgggtgtctggtgagactataggagaggatatgttcttcctgccgcgggttgaaacggccatggggaatctctatcggatacgcagacagctactagacacaattacctggcatgctgttggtgtaacaggcactagcttccgactgtccctttagcctggtacggaatccctaccgtattcgagtctctcgacgcattctctgttgactagccttccccctaacgctatccctggacgcacggttttttgtatataatatatcgagtaattacgagtgagattgatctgaattaagcgggcttgtttgtatactcattttagtaaagaccacgataatgaataatgactatttgatgcccttcttgttaaaagcctcgggaatatataacctgctttgtatgtagcgtgattccccttgcaatgcgtcgccgcttgtcgtatttatatatttccaatataggacggggtaacccgaaataggcaattccttactcttctcttacgacgtccgttaaccctgctaaattgggactgtaggggtagttccagttatcgagtaggctaatcagttgttcccgagatgattccagtgcttgttcgaaaaagcgcagtcgagctacctgcttcttgtggtgaagctgaagaccgtccctctcttttctcaggtgtgtaccagcctcctttaagatctcattgctctgctcaatcttttggatatcgatgtgcttggaaacgcatgactcccataggcgtcggtagagtccaacgagtcgggctgctgggaatgcaaacttgggatcgtcacgttcaaggtctgctagtaccttcaagatgggttgaaatggctcggtcgccaaagtatgtcttgttactactttgtgttgcgaatgggagggctacgatggtcagccgaagaattcgaagccgaatggtttcacttaccaatggagggacatgatcagaaggatccacattattgcccttatcattaaggattggcaattcattgggctgctgttctccttgcttttcctggtctgacgagctgtttggggagtctatttagtctacagaagaaagttaaggatctggatagtactgtttccgacaagccttggtatctcttatagactatgtagacgcaggtggctacggactgaattttacgatccccatatcagtcaatcaacgcagtcagtttctgaatagaatttgcttttattttcagcgggcgcttggtagtgtatttgagaggaggaatgtcaacgagttggccgggaaaactgatcaagcctgacgatgttgagggccagatatgaacgcccattggcgtgagagatatctcaactagacgcctcttccactttcgttggaagcctcagaaacccggcaaacagcattgcagaatgggtagttcggatagtaacgaagagcaaaatagaacaaaaaaaaaaaaaaaaaacacaatttatcttcgaagtttggtggttatcacttaaattgagcgttgacaacgtttggccaagctttaatgggttgacgggtcatcctaccgtgacctcgctttctgcagtctaggcagacagacccacagcttaccacagaccaacacaacactaaagcgaggccagaaacaaaggtctatgattcatagtgatggaattataggagcttttcggtgatctaacgttgagtcgccaatatataaggtgactaggacaataaatatgtgaatatgtgcctgttattacggattgaatatctcctacaaagccttaatttaagagggacgtgaaggatttaacagtcagccaatattgcttgaccgacttagcatccctttctctcagtaccactcttactcgtctctcgctgggcatctaaaggtatcaagaatatcgctacaaatagttgcagtaaaagaagacgtgggtttcaataggcctcaattgagaaatatatccttcaatacttctaaccaggtcggtgagtgatagaagtcgaaaagcctatatatacgtcctctacccctataattgctctactatttatttacttgattctgtaaagtaggcttattatatctgatgtactcgataagttcccccctttaatcgagtattggagtttataccgtactgacatttatagtatacattgtagactagtaaaccagacagttcctgtactttaagagatatggttctaagtagattcactgccccatttacgctagccgatcggagatatgagatttggattagctagtcaaggcgtctatgcgaagacgtctctgctatagcaagttaatctactgtcgcggctctggttaaccacagatttgaagtgtaactactcacactataggtatatgggcctatagatccttgaaactacactgacccaaaagacgcgggacagccagatccgtagacgttcgaatataatgtaccagagcaagggccactcttcatccctggtcttgactattagaaaatgtgagttatagaattccacgctggtctactagctaataattaatagtgaacctttgggagctcaaccagagtggacctaataaccctgcactaccgtcagtacaaagccatagcttatatactatttctagccctatcgcttcgaacaatgcagtatatcctaggtggaagatcgcaaaccaagatagcgatttaataatagggtgcggagattcaagtgtaaacttagtcgtatcgaagcttaaggcgtccgtccttcctgatagtaagttatcgcgtcttctgctacgccggtccgattaaatataccaagccttgtgcccaaaatcacaataccactaacaccttcacgctattataggagtacccctcatcgacagtgaaatatactgtggcgagtggcctattccgctagatcgaggataagactaaggtggcgggcgaacagcgtactctatcgcatcgcatcttctgccttcgtccccaccgccttcgcactattaaggagtcctgaacctctggcatcgcaacgcgtttatccgccatggaagtgcaatatttatcgcgggtgggttcgtaacgcgcgtttactgtctcaacaaattgccttaggcaccctagcgcggcttttttgaaatgagtgcagattgcgataagcttaaatgcgacgtggtatggctggtaactgtattgcagagagttgtaagtgatctagttgtaaagccgatataaccattatacaaactgatcgttatatctcaagcgcactttgggattcccataaacaggtacactacgacagctcgtctaagatcaatccttgctaactcgaatcgtacaataggaggacacccttatttctgtcacttgagtcgaatgccacgcgaacaaatattttatctattccagctcccctatacaattacgattatatgctctctatcccttccacatgaatactatcgacgatgagttaccagaaagttcgtatcgcgtacctcggcctctgtctccctattaattctgtgtattaggtcattgttcgagttcgatttatctatatgagataactcctgaattccgaccagcctatacctctacctgaatcatatatatggccaagcatgcaacctttcaaatcttcaagtggcgtaggctgctagtatcaaatgcgtgatcctggttgtcttaggatgacatttagtgtctttctagaactggaaaaaaagcataggaatgctgatgttttgtcttgcttcctggcagatgagtatacctccgcagataatcaggctattagtacaagtccacctacaaggagaaggagacacaaaggcttcccatttttaacctacaatttaacattagttatctcaggtacaaatcgagagggtaagatcggggtataggcaagccaatgagagctcactgcctaagaatcacctcgagtatacaggaagctatattataagggctgtcaaaagtactgtggtgtgcccagtaggttcttatgtacccatttcctatctaagccgaagcactatctgcaaagaccatttaccctaggtgtcactgcagctacaggttagtcaagtcgactgcgcatatcctttatccgtttatatcgtctcctaatatatcacgcacttgtcaggaaatccggattccctatatccctatttcgacggtttttttgagaataaatcatatatccgtcgagcccaccgtgccgcggaggacacacaggtatgttactgttcagccaggcagccactgtaaagactttggtgtccgaaataatatcgaatcagaatgtttataggacctcttggactatcccctagatcctcgagcaaactttccactgtcaatcaacgctcatgtgatggttgcttttggaaggctggccagactgactactacgactacgagcggactagcactcctgcggggatatcacctaacggaaattcgtttcagacggtactgctagaacccaatcgggtttcaattaggtttcaaccgtgttctcttatcagcagaatatggttgattgcattaacttaggacactacttcccaaaaggcaattgccgtcacttcgatccaggattggttgaaatataatccgtcgttaccgaggcatagtaggagccaaccgggtattcttgattgcttgcttgtctaaatctcttagcaacatggttgtctctgcggtaaaattactttgattcttgcgctctctaggatatagtagctgaaatagggtaaggtcgagtgactcaatcgccgccttaagtgatggctttgacttcgcaaggcacaaagcctaccgtatggctaattttactcaagccattcgtttggtaccttatcacatgcttctatacgtgggtcttaggcgtattgcttggtcatagttgaaccagtggatctactatcactatcggattgaggctgtatgccaacttcaccgagtgatcagaatgggactagaattttcgcttacgaaacagaatctatagtgattgatacatttatctatgtgggtgagatgatatgaaaatctccgtactacgtctgtgagacattgatagacctcgccgcgggccatgaggcccatggattcgcactgaactacttccccctgcctatgggcgggcgggcggttgaccgtagtcccgtgttatttaatgggcccatgtctcgcttactaataagcacttcagtcatatgaaattttataattttataatgtttagccacgtacgcatatgtcctatagtactatgtattcaggttatttgagtagaaagtatataatgggtgtgttcagctataactaaacctagtaaaatcaatggactatcgagtctaagtgaaattgaaagtgtggtccgaaatgcaaagaaattgtgatgcgtctgcattgcgtgtaaatatatatattactacaaaatatgctgaacctataaaaccactcacaatataatgcctaccagttgcatcagtaaatttattataaatacgacatattagttatactacatactaggattcacctttattatgatcaattatctgctatactagtggttattaggggtaggtgacaagtgatagatttccaagagttgaacccccctattcaggaaacttatataatctgagggtggcatggaccgatggcaaggcctagacattgaccacctttttcaccgcccgatcaacacacatcaacacttaccaacactcacatcaacactcacattaacactcacatcaacactcacatcaatactcatatcaacactcacatcaacacttatatcaacactcacatcaacactcacatcaacactcacatcaacactcacatcaacactcannnnnnnnnnnnnnnnnnnnnnnnnnnnnnnnnnnnnnnnnnnnnnnnnnnnnnnnnnnnnnnnnnnnnnnnnnnnnnnnnnnnnnnnnnnnnnnnnnnnnnnnnnnnnnnnnnnnnnnnnnnnnnnnnnnnnnnnnnnnnnnnnnnnnnnnnnnnnnnnnnnnnnnnnnnnnnnnnnnnnnnnnnnnnnnnnnnnnnnnnnnnnnnnnnnnnnnnnnnnnnnnnnnnnnnnnnnnnnnnnnnnnnnnnnnnnnnnnnnnnnnnnnnnnnnnnnnnnnnnnnnnnnnnnnnnnnnnnnnnnnnnnnnnnnnnnnnnnnnnnnnnnnnnnnnnnnnnnnnnnnnnnnnnnnnnnnnnnnnnnnnnnnnnnnnnnnnnnnnnnnnnnnnnnnnnnnnnnnnnnnnnnnnnnnnnnnnnnnnnnnnnnnnnnnnnnnnnnnnnnnnnnnnnnnnnnnnnnnnnnnnnnnnnnnnnnnnnnnnnnnnnnnnnnnnnnnnnnnnnnnnnnnnnnnnnnnnnnnnnnnnnnnnnnnnnnnnnnnnnnnnnnnnnnnnnnnnnnnnnnnnnnnnnnnnnnnnnnnnnnnnnnnnnnnnnnnnnnnnnnnnnnnnnnnnnnnnnnnnnnnnnnnnnnnnnnnnnnnnnnnnnnnnnnnnnnnnnnnnnnnnnnnnnnnnnnnnnnnnnnnnnnnnnnnnnnnnnnnnnnnnnnnnnnnnnnnnnnnnnnnaagagtaaaatagaaaaaaaaaaaaaaaaaaaaaaacacaatttatcttcgaagtttggtggtcatcactcaaattgagcgttgacaacgtttggccaagcttcaacgggttgacgggtcatcctaccgtcacctcgctttctgcgctcaatcaccacacacatcaacactcaccatcaacactcacatcaacactcacatcaacgctaacggttcaacgcaacaagcgttcctagacaacactcatctctgtttgcctacatctgaatgaaagatgccaatttctattgtagcgaggaagttattggatcacaagctaccaagggaaaaaaatgtgaaatacgtcatttgatactgaagacgcttcaatttgttagtttatgattttggctgttgaatcgacgaagatctaactagggctccttctatgtatccaatgatgacccttcggaacaatgaacagacgatgaagatgttgcgcaggtctttgcttcttcgggtactcttgaatactctaatactggtccctagcaccacgaagaggtgcctgcacgggctagagggactttttgtcgcagatgtccctgcggagactcttggtttcgcagatgcccctgcgaggcgctttgttgacgcagggcctaggctgcggagaacttggtaatgcagcggtctcctgcagagaacttgttaacgcagcggtctcctgcgggtctcacttgtcatcacagcgtccccctgcggagttcacttggtaacgcagcgcccccctgcgaggattgttgttcacgcagacctatcctgcgaagcacctttttacactcgcggggctcgtggcagcgagggagcgcaagtcttacatcactgggcttgtggcagcgacagccgtggtcacggagactctcaagcccgcaggcaagagagggatactatgacataccggagtgtgaggaccgaagtcctgaatttttttgggctgggaatcgggctccttttatatttttcggctacgtctctaccaaggaaccagttgcgcagttggtagtgagagtcacggtctcgttaataagcgttgaagtaatttcaacgacgttgaaggggtgtttggagactttgtggcctatagactcaagtctcgacctggcctacttcctcttaaaattgtgcgttgagtatggtgaaccactttcatcaactgttgaaaagaaagcaacgccgcaaacgtatggttcgtacatatcatcgaatttgcaattaaatcgcttaacgcgcttacattctacatgtccccattttaaccacggttaccatttcttaatgagggttgaagtgcttcgacagatgccgaaataatgggctgtagactttgtggtcgacggaaacgctgagctgtacctggggttggccggatgacattttggtctcactagagtcaacccttcatctctaggctcgcgccgctgacttttatttctactcgcagctgacttatgttgtctttactaaatatctactccctgggcgcgtaggccttggcatacttgcaatctcaggatgaagattgtctttctttggcatgatagccaaaaagggcccagacctttgaaaagcttagacaagaaactgggtctagttcccaggataaccatgtgaactgatgcaaccaaggcccacgagctaggttctcgtgatcgccactccctcgcaagattgcaacgctactattatactgatgagaccctggagacgaaaagcacccgaccggccaatcaaacaccacgtgtgaattcagatagacgcaggtagggttctgcgatgcagatctcagcgacgacccaggggacagtagatcagggaggctctatttgtggagagaaaatggaaataattgcaaaggtccagacacgatccataagcctaaagttggctgctgtcagggtccgatggaacggggggttgttgcctaggcggtactgctggggcaggtgagtatttggaataacacgcagactttggcgatacaatgataggctacaacccgatccgtggttgtattcttggtcgcagtcatgagaaggtaagttcccctgtcaagtggtaagctgaactttgccgatctggtctgtagaacgttctagaagctacgtatcttctcctgcaataagcctttctccgatgattattgctctctttggaccgtaacaacacttcctctccatctctttaaatctaccgctatttcaataactctagcacacggcttgtaaagaactatgccaattatggacaaaccacatgagcttaaataaaatgcctccgttttactaaaaccgattggtcccggataatatttcgatgtgggccggccctcctgcggccctaaaccttatttcaatcgatctgcatatcttgatcaagatgctgaatttaaagaaactttctaataaaatgttggccttgccgcagtaaatttatcctatatactgcctggcggagattgtagtgtttctattctagttctcatttttgggctgtaaggtttagtcacgaatagaccagaaagtgggtagaaacctaggcttgaattcttcattaaaaccgcattctctcaccgagcgagcatttctatggtttattacaataaactctcgaaatgatttgcagttctgctactgatcggcagtcccgctcgtggttccgcagtctgtgtcaaacttaatttccttgtgactcgggcgtgggttgaaagcagatcggacgcttcgctccacagatcacactgttttcgaccaccgattcaatcaaaccctgccaggtatattttactgggctaacaagatttcagtgccagagccccttcctaccctgtcctatctctctatgggaacgcgcatagtaccgtaaatccttatacactgtccgcagtattttgtaggccacatgggccatgcccctggtttagaatgacaaggacgtgtagctgggcctgctcagaggtactacgaccatgctcgaatgttcacctttgactttggaactttcttactactgttgtaattccaaataagggtgattgctccttcctatacgaaatccatggagtgattcatatctcttatgctagtgtttattgtcgagtaagcatagcctttatggtaataatatatacctggactattttattgaaatagttggctactgttccttcgatatagcaatgtcgcgctccgtcgatgatatgctgctagtgtggacgttctgttcgccggtatctcagtttcctggcggcacagacacgatatatatagtcctatatctaggacgacgattgtgttctttgaggcgagtacggaagcggtgctggcgtcacgtagcctgtggcaaaaggtcagcctcttatataggaagaataaaagtattttatacgtattttcgagcgtgatgtttgagctggtttatcgctgtcgccagactggctagggtcggctgttagaattgtttgaaaccgtttgttaatgttcctttaggtagaggtattttctggtagagttgactgtgaaccgctatcgactagcgagtgccgcacgtcgcctgggcgcttttgtctgcctgaatgtccgggaactttggcgctagtgcgatgctgcttccgtagaatatggtactttttcccttgtaaagactcaacgcttcgatatacctgatattcttcataatatgtatcggagagggctttctacgataggccccgatgggaatccagctaagagagaaggtttttctcttcccgttctggccagctgtatgcgctacgtagggatatggtgatgcttgggcaagtcataaaagtgggaagaacggttgaataaagcagtagaaagtgaattcgaagaggaagggttattgagtttaaaagatcatagtattgtatataaatatggcgattgcgtttatgagccatggctcagcttggtgaactggtaccagactcttacgactcgccccagctaaagcttctgaaggccaaaagcctttaacttttgatgtactgtgtttcgttaagaatcaataacgttgaatggctaccgtgtacctgttaacaatataatatggttctaccagtttgttgaaatatatccgactcttagtgagccatgtagaaatagaatagatatctacgtgtagaatcagaatgtatgggtgaaaaatgtgtgcgcttgcaattcctgttatagtgagtaagcataacacttaattctagtcctgcgatataacttgctataaagccggagtgctttcttctatcacacttaaccagaagtaggaatacttatcacctcagtgtaactcagacgcagatataggcggaattcgaaaagcctcgcgccctcttcgcaattcctgttatagtaagtaagcataacacttaattctagtcctgcgatataacttgctataaagccggagtgctttcttctatcacacttaactagaagtgggaacactcgttaccttagcgtaactcagacgcagatataggcggaattcgaaaagcctcgcgccctcttcgacgaccagactttcggagcagattataacgtgcattgtctttatcgtccttagagtctaaggataccggtagtgtgtccagtaccgctataggggatataataagtgacgagttaccttcttaggaggaatacgactccggcgactaggaaaatagtgacgcagctgatgagagtgagtaagaagctatacgatagtagagaactgtgtttggatatgaaacggacttaggaatatgtgggcaaactcagctatccggagacagtaatacagttgctcttgaacgcctaacagagtaagtataatcctatacggatataattaagaattggcctactaataatatctagactagataaccgaatagggtgagctgctgtcgatactgagtgagagtgtaaagtactaaccatctctgtaggtctattgagcgcttattgtatgactaagccacctggaataaaactattcgtaacaatctggtcgatatcttaggccgattggcaattgttgagactgaggtacagaagttaaatagataaggtacaaacaaatctacagagggctagaagaccaggcgatccctgcgtcggtagcagtgatatgacctaaactatgttttaatatccgactagatattctagagtaaggcataaatctatattggtcttaagttatggatacgattcttttactaactgaaaatattactgaatatagacacttttattatggacgctgagttggagggttattagaaaaggtctgattgacctaatacgagctggtactagacgagctatatatagtttatcgttgtatttaggtcttcgaattttattaatacttgcctagattgtgtatactaaagctatcttacccgagccgagtggctatagtcgcgatctactatatgtaaacgagtactttaagccttttattagttctactattgcagatgatttgtactatctagtctagtatgattgtatacggtttgtataactgaagatataccctaaaggctaaagctacagtagtatataagaattatacgctatgtaaagatgattgtatattggttacgactattaaggtacaatccttcgtgattgatactagtagagtagttcaatgtgcctagtagttgagtaattgctatttgtgattgagttagatcaggatatactacagtaagctttagattgaggaatgagaagagataacaactgtagtatgtaagagaagcggggatttctctattagacctatagctataaggcctagtattgtcctgattagactattaagatgcattccctttatatggactataataaatatcaactctacagactagcatgccaaggtctttcctatttctgaagggtatctaagcggtgtgatactgaatctaccaggactgcgtctctataagtatcagtcacacctacttattacatttcttaatatataaaaaacaaccaaggagtagagagtggtgaacccgctgttaacctgcgccgaataatgtatcgagacgcctgtgcttacttgtactggtggttcttggactaaggcgcctagcgatattcttcggagtaagaaattggcaatatatatgattcgtaatcactacccttagaatggtttagtgataatgttgcaggaagcctgttcatgagctatctgcacgttaactctatttaaaaaggcaattctatccacaggaaattaaggcctagtaagtccaacgtagatattcgtttaaacgagagatctgaattggttgtgcacagacggttcctgctgactaggaagtgggacattcaattcagagatgctgaggtaggtatcgtggccctgagtagccgggccgctttgctcggccgggtccgtgtgagtcaccccagagcctggcaaataggatgccagttatctgttctagagggtatcgattgtgttctaaaatcgagtggttatcgataccatatccccgtgtgcctaatctagaaccagctgaatatcattctacagtacctgatcctgcagagcggcatttgtggactctagctgctgctgcaacttacagatcttgtgcccgacccgctgactgtcagctaatgctgtatctcttactgctatagccagctgcaatttcgaagtttcttcggttttctcggctttaagttgttctagtaactggtaatgtttgtgtctctcctcttctctctcctcctgtgctttttggatctcttccttaacgatgctcattatatgaagacatttcctataggacactttattatatttccgcctagggtttcgtgtttttgtgatagaggatgcctaccatagttagttaggagtacgttaaggtagttaccagggcaataggggcaatgttggccaaggaaaatccagaaaatattgtggaaggtagagattggtactgtatgcttgtgtaacccagtcgccggtttgagagggttctgattgtgtttcgatctagaccaagtagaccgaaggggataacaggaaggcgcagtatgcagctgtactttactacagtggtctgcctgttcccagaaagccttgtgattctttgccatgttaggtgtgctcaatcgtgagattaataacgactcgaagagatatagaaagcttgaaagaaatataagtagtgagttttgagaagcttaattatataggagtatgcggaggcctaagcgcaggacttgaacctgaatgaagccgctcttgctcctgcctaggaggtatgctaaataagggttataatcctaagaaaaatgagtactgggcgttaatacgaatgtataaaacacctaccgctcgattatggagggtatgagcaacaggtccgtacaaatatatatgttggtgtatacaaccctattttatgatagtaaggactaatcggccacatcctgcctaaagtttagtatttagacaacaatgttatctttcaaatgctttgtgaaatttgccgactcccacgactctatattggtcggccctaaaaaatagcggccttgtttttccgaattaagagttctcactttcctgtccgcatatatctggattccccaataagccgttacttgagttatgggggaaaggcatttcttgcggctaagactcagtagtaagggtatctatctagtgtccactatattatagatatgcttgggggcataggaacctctagtgctacgaatcaagcggcagttatagcaggtacccgagtatgttataattgtcaatttaagctacggcatgggcctcagccttcaccagttgaggttctactatcaagtacctaacttgagactcctacagctcacttccctggtaggctatgatcacagtctatatatactatatatcacgataccggcgattatttgagtttaaatgaatttggtaccgaattgtaaggcgtattattggagtgtaatattaacgctatctttaatatatgataactagggtactcagtaggctgttagcgcatataggatctctgttatgtgctccggttaatctaagacctcgcttactaccttatggatgccattgactgacgattagaaatcgcgggtgctaagttcgatcctaattccctctgtttgcaatgagtttaatatccgccttactctagtaattcctgctttcgcctctgttaacttattatgcagtttcttattgtgcgaccgaagaatttgtatatcgtggcggagtttattggcctcagtccggaccgtgtgactttcgttaagacagttattcaatcgggcataagtgcgttctaactcgatttctatgctgttattagcagccttaagcttagaaatctctgctgtgaaagaaccatccattccgtcaccaaaactctccgcctctaggctctgttagcaatgctgtattaataaggatgtctagtaatgcttacctcccttggaatacagcttgtatttgactgtgagtgtcctaacgcgtgcggggaaacagcctcgattgaatggccgatcttattgcaaattttccggtaaagataaatcttaccgctacttaagctagatttaagcacactagcatttgcgctcgtgatggactaagcgtatccatctttaggtcgcggttggagacagactttttcaggagcaactacgatgccaagtcggttatctaggagtattagctgagttattatcggtagggggccacgggtatatatattggccgctagggcttctcgatattgctgatttagttttaagcgcttctcgttactacgcttaggtatcgtagggtaccttcagcactcaaagaatattaagggaatggggacgcgggtatttaaaatatgatttagaactgacccttccgctaaaacaccggcttaatgtaggatcgatgattcgttctttcttaggtcgaaagtggtatccgtgggtagggcctaccagtatctattaaaattaggtaaataaagtttcagctgaaaacttggattagttaagatttggttgaaagtcgggtataagttttattgagaccttattaagtaaactgggctactgaagaaaatataggaaaaagtaacctcaatttctgttcaaatatatcctcaatcactaagttttggtcggcaaacgctagaattaatttagttggggcgtcttcacgctaccaaagatttctgccttccaaggtaccggcggaaccgatagtgacttaacggagggtcgaaagctgatgcgactgagcagactatcgggttcgctaataatattcccaaagacccagcgaatattagaatatatatattgagtaaggttgggtcgactctatatactttgcgctacctatctgttaaaattgcaatgactccaacagctcgccggccccactgccaaagactagcgagcgaccactatctgacgccattactgtgtgactccttaaagcttctgccatcaaagatgatcactcgccatgccggtcgtaacattcgaactgactcatcgagcctaccttcgcagcgagccaagaaggtccttaaaatgaggattcatcatcgatttcatggctcgcacgttacgttccgaaaaccaggcagaccctaaaggaagggtgccaaagaaagcccgcgccggaagggagcgatttcggagcgagaggctattcgattggattggatagggcgacttcgtcccaagccccatagacgttgttaggtcggacaaggatagggcaaacataaagccccaggggttggcatgccgcatttactaattttgttcatatatcgttgaatagatgaaattgacttgcaagacaatgagtatgataatgcagtgcgtgatgaggtagcccgtaaacatggactctatgtaggggattgctcagctaggcctcctatcgattgatataggcaaaatcgccagtatacccatgctttcataattgctgtgtattaccaagttgttctgagaagagatcatgctactctacatgcactgaagcaaggagaacgcagtttacggtgtagatagagtccatggggcgtcatgttctatttttctatacctaatttagacttgaaaacgatccgttgcgtgattcttgtgaacattttatcttttagagacagcacgattactgtaacaaactcctggtttcaatggtcttgtctgagccacccgtccacataccacaagctagttggagataaccaaggatccacctatttggctcacgggattgactgcaaggatgatgcccagatggcgatgatgaccagttcgacctgttgagtgtcagcattattggtataacggtataacgtgggaatctgcaattacctccaatgcaatcatccacgatctctctaacataccaatgacggcaatcacaagcaaaagaagtgccattgcagagagataacacgagatacactgcagcttagctcgaccggcagttgactgttgaaacaactaccaataccatgtaactacacaaaggtagtccgcgaagagaatatagaggctacccagataagtagattttaaaaggaaggttccaacgagggagactgctattttcgctaaagttaaagccacagagaaagaagggcatataaaacgtagtaattgaggcgtgagcgggttttcgcgctactggaagattatgcggatgtactgcagcattgttagttagaactaaaacactgtatatgaccgagttcggtatgctgtgagcttaccgcttatagtggtgggaatattggggtaatccaaaagagtacttgactctatgctggaaacctgttgctctagaacaacctagcaagaatagtaaaggaactacaagataaggcacacagcgctaaatcgactttatactaccgccagtgtggttggatgtaatacaaaagaaatagtctcctaaagttaagaagtagaagaatagttactaagacggatctaatgatattttgtgaaaccataactatactggactgccagctaatgttcttgtttgaacgaggccttgagatttatataccgaaatagagatatattggccaggtaatagtagataaattcctaggatgtctttatttgactctaggattttcttatactgagtttcctgcctataaaaaagcagatgcccttaatcttatgatacagaaggttaactgaggattcttagttgcggcttcggggcaatacttttgctctttttctatgtagacccgagaatagacatcacatttaaagcttgtagtatagtttctgatttagcttgtattatgtaagactatatttataagggccaatcacagttgtagtatcctgcttttatatagatatcgaggatatgcagaggtggtgtatatatttataaatacctaacttaatttctggagagtactgccattctcttaggacttagtcttcggatctatagaaaaagtaaagtgtatactcgctataatatacctggaagtcatataatgttttgataaaatagcatttacctttaaaatggctggaattagctatagagtatatagtgtcttgaatgagtacatcctaagggcagtttttatgtaccgcggattctctgtgttagtttcagcagcctatggttgtctgccttggacggacttattagcttatcgtgattacttgttcggccgaaactgtaactcgaacctttgcttaaggcttataatttgatgatgttttattattagcaaaaatgatacgtgtctcctttctaaagggtgctgggatcagaaaatgtggagaccggggttacaatatccgttcaccgtcataatagtatcttgctattcgtcggcatactatggaacggagcaaaatggatagctatatcactaaaatattaaagtaagtgagatatgctctatttatgggttttaatcgcttataatttttactggcggtctgaagtgcctatatattgtgttggccgatgagtagttgttctaatgaagttactaaattggtaatgatatatagattgtgtttcccttttcttacttgtgttagaaggttccagacaataggttatataggatatagttaattggttcctgtaatctatagcatgcgatgtgtaaatgaacgtcgatagatgtgatagaaatacttctgctattttaggtaaagtcaatccgctcggaatgtgggactttttaaattgattacgtttctccttgctcctcgaaaaaatatacggaggctttcctaactaagaaataaaagttaatgatataaataagagataataatgaaatcgaaaatagtatctagatcaccgcgatgtagatattttatatggtgaataagtcacgcacttgaatgttaacggcttatctagatagtagaccgagataaaccgaatgatggataataggatatgacgtttcatgtgtgcgagactttgtagtctactattgcctatatttctacatactagtctatatcacgatatataaggaattgctacctgcaataccgctttggaatactctacgaggccgtatgtcaagactaagtacatactatggagactgggctgctagaactggactattccaattctcttaagagggcgtaaagtgtacagagcacaactgtagaggttgagaagcactaatctgccgaatgcagtggccagtggagagggagtgtggagcggcttggcgaatgtgtgaatggatggtactaaggccaataggaccacagtggtaaattgaagagataatcgggcggaaaatgcccctatgtccatgtccttgaggtagccgtccgagaggcttctaaccgcgaccattgtgaaagccgatgtatacccaagttgtagcaatggttgggctggaaagagaaaagcgattgtgggaagagctgcggtctaaaccaggaataaaccactaaactatacagaatcttgctctttcgtcattttctccttttggaatgcactaaggctattctgaaagataatatatagataccatatggcgcttcctctaccaaacgctattactgctagagcgtatgggattgactgttgagatgaggggaaatggaagatcaagaatattagtagataaatgataaagtatgagaatctaagcgtgcctatgatgataccgatggcgtagctgcgcaggttttggtaatcgagagtgtttattgtataaagttagggtaagcaccagccttcttgaggtagcattcctcgggcgagcatttggctttatagacaagagtggagctcagcttttactgtattgactgtgggtgaggtattgtagaaatataagtgttgagataatgatgggggcggcgttgatcactagaatagtgaggaaccattatatctgtaatgaccacccaccttaacggccggagccttagaaatgagcgcgtttatattaagttgctaataactgcttttttgccttatcgatattcaaccagaccgaccgacagatagacctccgtggctatgtaattggtgtctcttattatgcaaatgtaggacctgtgagtcgattgtgattcttcctctcttctatgatagcactatagaagatattgtaccgattgtacgctagatcggttaataataagctcataatgcttattatcgcgattgctattccccctttaagctactctaagagcttatagaacatacgttcaccgaactataaagactttacaaatccggtaccgagcgctcgaccaattctgtctattaacttctccgaaattttcagaatacaatctgtaatctggttgaaagagtatacgaagcctaagcggaatacgagaagttctgctcagtgaatgaatcacacttagtgcgcgttgtcttcgagcctattaggagaatgtatactaacctataagtctcattgcagggtataagatgatggtggaactactagcctagcatcgttgcctaggaagacggatgtgtacgactggtaactctactatggtgatatttttaaaggcgggatttctgtaaattctatagagccgcgtgaaaatcataatgtactttgtgtaccacagtatttctctctaaaagcttatatactatgtaggagcccactaatacaaagctcttatgaattagacacagctatcaagaagttccgattactacagaatgtatactataaaggcgagcaatatttagccccactatctgccactgtccttatatatcatttcccatacttctagccgaatgaccatctataggcttagcaattagatgtaacagcagaaaagatggactaaccatatggttgaaccactaatagaaaagaaatctgctaaccatactgtggtaaacatcttagctctaagggtaacttcaacgctgtaaggctgcagggtattcttgaccttagaagcaaaaaccctatatatcactgtgaccgcaattgtggcagtcgtaattagtatcgaggaaagcttaatttatcagtatgtctcttcaatatttgtccaagtatcacatactgtgtaaaatatggtaagtgatctgctgccttttgaaaagaaaactttgcgataagctaaaactccggataatgtggttaccataaacccagcaatatataaatagactacactctgggaaaaccgtcggtagccggaaactaagcttaggttaatatctggaagtatattgctgagatttatggatgtggaatcaagtacggcggataggtcaaaagtaaaagaggtgctggggtcagaataaactatctccgagctatccttggctttatagtagttccagaggccaactaaatagtattgaggcagatgtgacttaaattcgtgtacctaggcttcgactatgctgctggcagctgacgttgcctcatggattgcttcatttgcactggtatggatgctagatgccatgccttcgacggcatttcttcccttattctcaataagcgcagtattaacattgaatgggtcccgaatttgtaaatcacgcagctttagaaattcttttaggtctacctgccgattgcttagcattgattagtatggaagtttttcgggcgtatcttacttttagaaaatgtagacccttcggcgaggaagatgacgaatatccgataaagataagagatagatagactagaatggcgacggtaaatgataatgctatggttgaaactagcgaatccaatctgctcttggtggaaagctttatggctttagaagggagaagatagaggagtgtctcttgaccgaataatagactttaggatcgagagaataattgagaactatgctgtatcgcaatttagggaagtatatatataagctttccagatatggttaacttaacctgtgtgggcagtgttctgcaaatttaactgaggccgtcgcaattttctgccttattctatgggtagtagtagataaatgtgttaggtaaactactagtgaatggggatctataatacataggtgttgtgagggcaggtagataattgatagtattaactaccggaatatgagggcatgtaattataagtgattaggctggcgagttagatcttcggcctacaattattctcagatagatttaataattaaggtggtataaatactactgtatagagtgaccctcgatatctaagttgtctttcttattattccatatacctcctcacctataaatcacaggtgacttgtactagatcccgttatgttattttctaggcagtcagaagttgaacattgggagcggaaattatatgactatcgagaaagttatttcgagctatctgccagagtgtatatctcttacctcgtcttcgagagtgggtttagaagacggatggatggccggcagaatatctatcgattaatacaaatgatgaagatataaggctgttaacgcttgatgagggacaactacgtgccggtgatagtccctagggcttattggtaagatcgcgtgcggccccgatctggcggtggaatcattcttagcttagatatagagctagactataggttgtgcgtatataaccacgagaaccttataacagctgtaaggaatttccttgaccacgataattagtagtggattgtagatatctatctaatagataatgaggaaggtgcgtttgctcagttttagttcttagagattgttgttgataagtttatagtgttaccagacgaccatagaaatgaagcggagtctattcgtcataaattcatccaattactgaaggagcggtatctaaacgacaatcgcccacctgatggactgatctatgagcggattaaccggtacgaaggctaccttgatatgcctagggatccgcttgctgcgaataactggtgggctgtactggaggcccttgtgggaagtaagaaaggaaagtatttgaagcaattttttaaatatgagaccttatactaaaagctaaattctttgcttattattctgggtctctggggagggatgcggattgggctactttataaactgacagctatgtattgcgacgaggtaaatttactctgaactataaaaccagttctatctcagctaatttgattgtaaatctagccagtagtatgctactgggaattgatcttctctactttttcgagactggttggaggaagggaagagcttttattgctgattgatggagttacagtcgagctgcttcaatctcgcgtccctaaaatctcctataaagatttgcaatccttgtaggttgagttggaggagggccgggttttcccgaacttcttggaagaggctcggtaggatatatgggcgcgtttgaaagagatcgattatccaattctaaccttgaaaatattttttaaagatcggctctatcttgaggtggctcaaagtgtcataaagagactgttcgtctagccgcgaggggataagattactattgaccagggtgtgtatgggaagtatgacactccggttcccgtctcgatggcgctgagataggaatggttaggatccgacctgctcgaattttggcgctttagcttctagtatggatttgaaatgaccgattactaatgccttaaatggccgatagacgctgatcccgaggatatgcttgatcggcgaagctccggatcgtcctttcttcctaagtaggaaatatggtgccatttctttacactggtgagagcgagaggtttctaagtacccgtcacagacgatatgttatttgcaataggggagctaccttcccctagagtgtgcgaatttctagaagacttagccgaagaaatagaagttgctaaaagatgtgggaagccgtactcgaacactgttgaggcagatcgattcgctttgtccgcagagacgctgcggtaaagtcaagcctcggttcgagtgacggcggggtttctccgatagtctgtttttaaggcgttctttgctatctgtggaatagtaatagttaaatggccggtggtgatcctcctgacgataatattgaagttcactagcgcggcgaaaggccgactactgtaaatgttggtcgggctatgatggccatagacggtatggatgtggatcctgggagccttaggccaaaccctcttgttactttagtagcgcggatgtataatgccgcggctactgcttcactagctgatatactgctgccgttcggtgttatgactatcacggttggacgaactatatgaatattagacctactaatccacgacttatttatgaaagacttttcgactggtctatttaacaataactttaatgtctagaccgatgagagggaaaagcgatccatttccctatatatgtgctactcttattatctgtacaatccgttgttggtgctatacgccgaatttagacaaaatgagtatactacctacgctattgtaccctcgtaaatcggcgctgggagtaagagaaggatgcttgatgaagacgagcagatggctagagcggaaatatggttacaggagtaaattgcgttgctttcggatcggtgtaacggcgacgaagacctttgacgggaaaggaggtatcaaatttgggtttcactaaggccttgaagaggctcacggtatagaggaggcctggtatggtagagatggtatgagtgaggtatgtaaaaattcatatcttatgatctattatatctcagagcatgttcctgtaaacggcaacgttttagcttgaagcgagtaagcctatggtatctatcttatatagtgcgaaggaatagataataatgtacttcttgatttattgggatgtattgtggttcgattaattatatttattagatatgcgcttggtgtccggcactgatcgttatttatattttacagctgataattagatgtaagttctatagcctgaggaatctcaatggcttcaactattctctgatttatatactcttcttctatttaacacatagtgttatacttgtagtttactctctggccactattaagggttctataccatatggcgtcgctttaagtttaataagtgaggtgctgcctcttttatctcaatggactatggtacactccgccgacttaaatacctttgttgacctagaggcgcaatgataaagaccaccctcacgatggtccgcctccctaaatatataattagataatataacttgaattcctaattaaagagtggcttacttgataaggcaggtatttaggttgagttccccagaacccttcggcgagggtattgtggtggggctatgtgtctcgctaggtgcgcttggggatgccgagatgcttgtaaagcttgatgtattcgggagctcgcagctagagctcgcagtatgggtagtagacccggtactctcggtactggtgcttgtctgttgttaagtgctttcgcgtcttgtagtctctttattcagtggtggcgattggtatgaataattgccctgctgttgcgagggaaccttattactagctgccctttctgtatgttgccttaccgaagctattaggggaagttgattgtctagggagactgtaatactacgacaatcgatggaaggcctattaatacctgtaaaggttagcagttaggtataatgcgagggtagtatgatacctatatctactgagtgtactttctatctcagcctcgcagttaggtgataaggaaactgattgtgtgtgtctagaagttgaaagtgtggtatttaagcttccttttatagcttggtgctatgtgctgactgtattatatgtgaattgaatgaggggcctaagattaagggcttgaatctgactgaggatagcgatgactgtaagtagagacctgaatatgattaaataactttggtatttaaagacctggctttggcgggtggtgctgcgaagcgcttttatattattaaggctcgatgagtatatttctgaggtattaatttacctaggaggtgtggtaatcctatgaaagtaaaagaaatagagaagaacgatgggtggtgtattattatgttggtattactagtattaaagaaatgccgatgatattgaaaattgatgctagcgggagaattaactcttaattttgggatagcacatttgtgcctgtatggctcaatttaagattccctgtgtgtgaagctataactttagaaatatattatttctaagacctaagagatatatattatcctcgatctccccctctttaatggactttgtctatttctaattaacgtgatgagggccggtatagattctgctagcattttgttgctgcttctcgctgttttagtcgtgagtggctgtatattcgctctgtattatgcgagttttatatactgactttcgataggttgtaaggccctatgatgacccgatctatacagcaatatctacctatctagtgcgatccttagaaagcgtatccgcgactgtgacccgctgacgtattttctagtattattcttcgctaatattcctactgccgaaactactgtatgaaatgattatagaggtcggtccctattattgattgtttgtaagtatctaatgattgtaatagtaaactccggcttgtgtatatttgcacggaattgcttatatggacgctacgacggagaacattgaccacttgagtaaagtcagcgaaaccttgtgtaacgttaatgctggaaattgttattgtctgttatatgctaacctatctggtatattcctttgcaactatgtaagtgctctaaactttaaggtaaatagggctccgtgctgacggcactaagagctacgagtgtatcttaataaactgtggaagccttgtgctactggtgacaaaggtttaagaaatatgttaggtcgataacttttatacgtttggaataatcggtagctcttcttaaaacgcgagtgactcgattgacttttacttggtagttgtaggcgaatctatggggtaacctatagagtagtttagacctcttggccttgccactgagtcggattggtatttgaggtggactaattaaggtgctgccggagtgtagcacggatgtgattcacatttccgtatatatattcttttagaactcttaaattagggagctgtttttcctatgtacgcgcttgaaatgagttttactaatttgttctctttgattgcttctctacctctaattttattgacgctaggcctaatgtagctagtgaatatttattgccctttttcctatttgatatctattgatggggctaggctagatgtaggccgaggtgatctgactaagacttaggaaagaactaaagagaataaaatggggaaggaatttctagtggacctggaaagcttgtgcgttggtagtgccctttctttaaagtatctaaggctatcgctacttaagaagctttttataatgcttggaatagtatacgccgcgttgtattgtaaaattgttgaaaactagtactagccttaactcaattattgtgcttatgcttactgtatgaccgatgagataatactttgatagtacttctgcctaaaatagctaaaaagcataaattaaataatgttacgcgcgtagggaaggaaatcggttagttactagagcggttaaccctggaatattcaccctatctctattaactggccccttactatatttctcgagataatgctgaactaataaagatctaattaaatatatctgccttagggatagctcatttttagttatctcctgcttgtatataactacctttgatgaactgtttcgagatgtcagttcttcgagctctgcttataagaatgataagtgtgtataaagacgcgaaatctgttttgaattttgataaacagcctgactcagtcgttttaatttgggccagcctcgtctctttagagtttcaattttggctaggatttagcttatatctaatagatttactaatagtacctgagattgcttggtagggaatatagtcttataattatccctctttcgctgaagtatctgtttagactacaattgagccaatagatacgataatatagctgtaggatctaggctaagacggtgaatatttggtattattgccattaatattcctaccggccgctctactttattcttaacggcagtgatacgatgagttggggaggtgttcgaaaagagtaaaactaataggatcatataactgatatagtatttattagagatttggtcttgcctatctggcgatacttttgtttctatagctttaccgggattttggctaattaattgatacctagaagttataacctagccggtacagatgctatacgtactacctacttatactgtgggtatattgaagctaaagtctaatatgatgtacggtagctgtcctagacttactgcgcaggactagtaatattaaatagagatcaagtattctataataactggaacggcgctatgagttttctagtatactataatgcgaccgcagtcactattatcaatctttgaggctaggctatttatatcgctctcggtattaataggataaggattatactagtaggaagtagaattagaggtagtagacggtaaagccttattataagaatggctatatccgtaccaggtcgactccgaattagaaggtatagcgtatatatttaaagcacgactatgctgatattgattcactgtgattatttttaccaccttaccaccttaccacctttaccaccttcaccaccttcactatcgctaagtcctgaataggaaccactcttaggtatagattggcttctatctcatatacactgaacctagaattttaatattaaaatgtgtcccagagtctagttagagaaataggtggtcttgaaatggagtatcggcctgatctagtaagattaatcctagataaatattgcgaggtattttattaatgagttattaacttaagtatcatttgaaaaatacgagaatttagctgtcctaggtatgagcttcgctcttttttccagggaatctaccacttattgcgagggaagagtagtcgaacctacagtatgcctatagagataacggaggataaagtagtgtataataaagaccctaattaaagcaacactacctctaaaaacgctgctaagtataagtactgtgccctgctttgaaagccttgccgatagattactactatagagtactatattatgccatttataatctgaggtttttgtggctgatattggtctagaaatcgacgaattagtttaagaggtagccgccgttcctgttaacgtccttaataaggtttagcttctatcgttaggagtcagagataagtgatacctagtcgtcctagtgatacaactagcagcgtcagactactctgtgctagaagctccgtcgcttttagacatcctgctctatccggtttctctgatcttagaagcttcagtatgtatttagctagttgaatgatatagggactctacgaaaggtcccgacgagtccttagagtgcggtatttctaaactagcctatatttgagaggtacaattgaatgtaaacggcgaaaaggtagctcttatggttacgttctgaagtaagtcggtagttttattctttaaattcttaatcggaaagagactatggttattagacccggtactagtatatgatcctcttatggtaccgcttatagaatcttttttggtaattactctattgtacttgggttccgtcataggcttattactagggacgctaactggagaactggagtgtaatagtaaatcacaatataatggtcgatttaaggccgataaagggaattgctttaagactagtataatgtaaagccttgatcccttattatatagtgcctggcttatctgtaaaccaatagtttgagtatacgttggctttagtgaagctaacgtcggctataagttaatcattatcagctatggtgtttaaaggtaatatatcgtctctgaaggttgggaaagtatgagaaaaacctggaaagaggtatatatgatatatacgactgctaagcgatagctatgactttctatggcaagctgctttatagactgattatatattgatcaagtataggaagactagactgtgctaataagataaggtggactgttcaatatattaggtctctagcaatcgccgatataattctaagtttcgaaggctagggattgtggcaatataaaaggtatatagactattataagagttagttatgtctggtgctggccttagaaaatgtcaattctgtatgttaatacctagctgtatatttttattcgctagactataatataagtcgtagtagtaaatatcgtttaaagttcctataaatggtgactatcgttaaagtaatagattggacgattaagctatcgcagttgtccgatataaataagtatatctaccggctaaggtaaactactagttctattatagcaaattagtggacaatagcgcctcccctaagccgtgtcaagtaagagcaactccgtaagcgtcgcaataatctactacaatgccacaatgaattttagcttctgtatgggatgaaaagctggcttattatagaactacctgatggtcagatttttatatactactcctatctagatacccctctgcccttaagggaagatatggtaagacaaagattaatatgagtattcagtgatttggtgctgattagtgaaagaaaacacggcctaagcccactattattcgaacgccttgcaactatatttctgcgacctctgcttagttagttggtagagatatcccggtcttctgtgccccagttcgtcaaacctagaaatgggaagctctggcgaatcatttgaataataatcgttgtatggtctcgtagtaatataaaccgtttcgtgtttagttagttcaccttggtgcacagtaggatccgtggcgcacgtcaagaaataccgatctcaatacggtggttaaagtaatggaacctgttcaatataaaagccggactatgacatttcactatatacaacagggagaatcgagaccaatgtcaccattttatttctttgattgtttcttaaactctaagtctagtcacgctaggcctaatgtagttagtcgaatataatctggtcatcgcccttttcctattcgacagcccgaattggtttaggccagaagtagattggaatgggtctggccaatacttggcgacgacctaaagaggacagtaggaaggctagttaggagcggataagtaaatttcagttggttgtagtacttgtcttgtttcctacggccatattgagagcagatcataattctagtaaacttgagaagtttcagtattgagaggctctattcggtatatgtaaaggcctaacctatctatgggctgtgatcggctggttatggccaccgattgatattgacctcaacttgcgctcttcttattgagtctgccaaccaggggatcgagcgagggataatggctcatcttctacgccacattgtaaccgtcaccctgtgtccagttccccgatgctatctccgcctaacgtgtatccggcgatgtcggtggagtcgaccgtgtttcgcgcttggattaagagaaactgtaacatgacataagtactgtaaacggaacgcttcaaaaggggttataatacttactgattgggtcactagaaaggcgatggcttcgccttacgctgtgagtgggtagcgagccaggtgtctgtgttgcagagaattgttagcgcaagtctttgtgatatcgtaatatatgggcagtgtgtactaccggctctggtgggaatatgattgcctttaatggcctggaagcctggtggattattagcatatctcggactcggacgtcgaaagaaagagtcataccactggaatggtaaccagtaggacgcccagaatgaagaccccgagtgcgattatctgtaatattttttagaaacgctatatgtatcgcgaaggggaatgagggaaagagttcgatgttatatacctgacttttgtaggtagtcttgcaatataaattgtggttttggggatatatataacatgagggagagagttaccgacccctgttgaagtcacaatctaaactcgttggcccgtagcaatttgatgctatcgcctactcagaaatatgaggaatttttgaattcattctacccacttaaacggtaccccaaccttagtcaaccaggttctcacatttagcaatgatatatatttaggggaattcagcagcttatatgttacgtatcgcttcattagtttagattattatttataaaaccactaaagggctaaaatttataaattaatcacctctatggtcccgaaagttttgctatatgagggtatgtttgttaccgaatttgataaccggcgtgcttactaattagctaaccacttcggataggggcgatggaaagtataatctcgctacccggattttcggctcgctactttctattttgcgcttaatactagatcctgcagtttatatagcgataactcgaaacctatgccttctgcttcctttagcgttagcttctatcggagtctctcgcagccggatagacttacctagaggccttaagagttgcacaaattctttcgtctcttagaagtctataaaggaaaagttaaggacgaatgttttcagttgacctggagcacgttgacaggatggcgtcgcgtgattagtagcattcgctacgcagctgtataccgcattccatacgatcggaaaatattccttaagatggttcgcgcggccatcaaattttcgaaatgtatcgctagcttcgaaagctctaaaagactttatcgcatttaaaagttcgtgaagatatcgctttcagggttcgactagctgatagcccagctaaaacacaatgcccgcttataaatttctttgggtgaagcctaccgcgatcatttagcctggcggttggttttgcttctggaagctgttaggagagtgcttcagagcattgaagacggcttcgtctctaaagtgaaatagtttttacacgcggagttcaaaagtacttaggggtcgtccgcgtatcctacctataacgccaagcgtatggcgaactgcaccgtctcgtaaaaagagtagggatataaagaatgaattctgaaattgctcctatactttcaagttccgtgaaaatgcttaagccatagatctaattctgtctaggtgttaggtcactccgtccactttcattccgaacccaccttatccgcttgtctttagttatctgtcttgacaggagttaaagcaacacaaagctctggaagtgttaaagctatcgaagcgaagactgcctaacaggagagaccttccactgctgcttccactcctgttctgtactggtttcctcggctcgcgatttgttaagagctactcttaatgaaacgatagctcgaatcaagcgcgggtccccagaagggctgtttgcccggttgaaatgatactgtaaagccagactttgagttgcgtctattgtggtgctgataagttggtggaagctctcaaaatacttgcaataaaagtcgttcttaagtccctgttgacggtgctgctgtatcctttcggtcttcaattcggccattgacatttcgggttgtgttttggatttcctcagttgtggccgggtggtttccaaggccatggtagatccgctcgctatagagatttggtggtctagtaaatttatcttaggaagagatggcttgatttgtagggtagttggtatggtagtaatagggatagtatctttggctgtgtctgtggatcgactgtagatgcttgaagtgttgtcgcgagagtaaccgggagttcgatgttggaaagggtttatatcggtcatggactgtctacgtctcggctctctgaaaccgatgtatatagggaacgggagttactagcgttttaagaatggaaagtctatttcatggacaacgcagtcaatttgtgctctaagattgtttctaaacggcttccctcacattctcaccaccgttgacgaactgcgcactcttagccgtagaccagtaccagtatagtactaagctagtctgtaggaattttaccaatgttcctaggcgctaagtgtattgctatactaaggggtggtattatagagacgttatatggttctttgatagcgagcgaacttttgtcttcgccctgccacctactcgcgcttttagatttcaactaacgagggcgaccataatacgtatctacgggttataaggtatagatagattatatcctgcagttcgaattcagactcctatctagaataattgtatgattctaattgttgctattattactagagtaaacctagtctccgtgcgtcttgtatttcatcggggtgacccgtcgagacctaattacattttgtattctacttattaaccggcttaaacgttaaactatagttttacccagcttataaccgccgccgtttctaccctaaagcaggctctaggaagtgaactagtcgctttgacctgcgatagtagtaataggatctctgcggcggctattcttgatctcgatgatctgtgcgaccgaactaggcgtaaaccttttgcttattgaggaattcctacgctgatttagggaaaccactaatcctttcgcgaaaggtattattggcaatttcaattgtgaccatttcgttaaggctggtgacccaaaaattaatacgcttcctaaagtatctataaaaccggtaaatgtcgactagatctatgcttcctaaattaagatcctgaccagacttaaatctggcaccagggaactcgataagtacctgctacaagatctcggtaggatttggtcttgaataaagaacagatccccgataatgaaatgaagccttaccctggatgggagttttatccaacttaaagaaaaatattaccaacgcgagaatggtccttataagctcagctggaactgtaaaatctatatccaacattgcttctagcgagtatatattatctaatctagggagcgtcctatcgattacctggtctagtcggaaaatattaggtgttaatagatagggtaggtaattcagagcttctaaaaacccttgctttctatctatagatagagagtatattatggcctagaacagttggggaagaggcccctcctagattcgacctagtatacccgttggacgactggggggagatatggagaagcctgttccgatagagaggagaaggtcgtgtcgtttcgccataggccagataatgctcgactctcgcaaagtaataccgagtagggtgttcgtatagaccctactgtcttacagataaaggcctggcaactcttttagttagaagtagctagaaaatgtcagtatattgaaatgtcttatggtgcttggacttatatgggcgctgcaccactgtatatcgatctgttaaaagctaactgttagtaaggttgactaccactatccaaatcaactggctgcaaatggtcacttacgcgttaagtaaggaagggtcttgtcggttgttatatagagttagaaactcgtaggcggtattggtagaacgtggacttattcctcggtaattggctagtatgtaggctttactattagatatacagcttactataatggcgatccggcaacctgtaggattagcggtagcgatatcgaatatacaacaagataggttaacggctgcttttaaaatcttcgatagaccttcggaattataaaaactatctgtggtcaagttgaacgctaaggtaaactaccggatatagtgaggaattggggtttcagacgaataacaaaaaatgttacgcgctaggtacaggaacgcatcgaaatattgtatgaccgaagattgattgagaaaaatgtcaattgccgttaatacacctagaggaggtttcttagtatattaaccacaataaaagactcggctactcggtatatgtacctatactggttccaatacacaggtctggtaaagatgcgatcagaatgccaatacgactttctaaagcctgtagaaggcccagttggattagaccgcgcactctactaccatctaaagtgagaatcacagggggcttcgttagaggcagttagcgaacggtgatatccgacctctcttcgcagatgggacattgagtaacctcgaaatggtactccctaagacaacttggctttccgaagatcacgatataagtgtcatatattgcatgtttatacgggagtatatgctctaggggtcgactcagacagactaaataagtagtggtagagcgaagcctaccctaccggcgatataagcgatataacgtctcttttcgaatggctgccgatatctttactgtgcttaattgtataaagtagtgtacgaagtaggatgaaacgctagcaatatggtatttgaactcattgtcctaaatacttaggtatcgcttcttataaagtacagcgaataccacggtaggcgagaatcctggacaggttagcttcttaattaggttcaggagagtataagttaagaaatatggttataccatacatttgagggggataggcgtctattaagaaggccgaggctataaggttatcaaagtcctcctttaagtagctaatggatgtttacgtaacctcttgaaggtaattgtctattgatttgttttttatatagtcccttcgggctcttactaaaagattaaatggtactgtatgtaggagccttttgtggctttgtacgctagtgctctagaaagcgcttagatgagacgctgagaagcgtcgataattagaaattcgctcggtctggactatattgagttacttaacgattaatgtttacagtggctggaaaacgacactatctgaaagcccgtgacgtggatgtaggtctagaatcgtgactgtcctagtattgagcttttggagctgagtgtattcctgtgcgaaggcttctattatatgttgactgttggttaagacgatgactacctgtaggggagcgggaataaccttattactaattgtaagctgtcgacgtggtctctgtaataagtttattgcggcttggatgttagggatagaatcgaggaataaatataggatctaggtctatggtaaaatgagttacctcttgacctcttgctgtagccttgtaggggtcaacatcccgtctgtgccccctagtgagaaggtttgatgctttgtcgttgaattctttagctacttggaatcctctaacctttattcgagatatagaccgcttttagtaaataatataggattctgtgtatgggtggtcttggtgctgagatagagatggattaagcctacggggcctttctgtgtaatgttgttataggggaatagagcccgcaaggctttattgcagtttgaatttccgtaaaagtagagtagggatggatattgatattttggattgggtaattcctatactagttgttttaggcggttggtattaactaaatcctaagctttattctctttgacaaggtcaagctaggcagctattagagagattgagagattgagagattaagagattggtaaaagaatgggcctattgggaaccttatatacaggctcttatctaaaagggacaggcagtggcttaatagtggtcgacgcttaggttgaagttggcataatcttgtcttgccttaaaatcccctctgaactaaaaatatgtcaagtaccagaccagtgtattcgtagatgacgctcgcttaaactaattatgcagcaactttcacggtttatcagacggcattcttttttgatatcggaaactagaccacataagtctcaccgtaagataaaaatgtgtcttcccctatactaggacccctagacctagttagagcacgtatcatagtggcctttcatatggactatttaaagagctggtacggttctttgttgatttgcctccttacggtaaccttaaaactttttggttatggccttcggtgtggacaattatataagcacgctagcgaaaacgggattggaaaagactctacttcgcgaaattaaccctgtgcttgttctgtcttactcagctgcggatgtagccccagtgctgtgtagagttaaccagatataccacgccgatgaaacttcctatatcagaatgcttagagaagaagtagaaatggatatacattttagtatcagttggcgcggctaactgggcattgctggccggctatctagttattcccggtacattcacttcgctacagaccttaaactaggttgaaaagacattgtaagccaacgaggccggttatatagttctatatatgatccagaaccccctgttactcgctattgtgtgcttactttttgctagtggaattgcggctcttatgtggctgatgtatttcctaaatcttagggggaactacccctggctaattaacaaagtttttttgtaagtgaacaagtcctaactgaaagaggtatgaaaagccagatctaactctaatcctggactagacccctatgcctatatgctgctactgggctgctgactactgttatcaatgtttgtatatcttaaggtggggattggtcggtgatggctattataataactgctgttactagagtaactcttctgagctgtttagcacttcttgcgctttataagttctataagctagagcgaatcagaaaagaagatgaggatattcgacgttctcgagtatccaccactcttaataggtgatattagagttttcagaccggagaagagcctggttagaagtatcaccgttatatcgagactggtatttcccatcttttcctttttgattctacccctcattctggtactgcggaagcctttttgcttctagagtttagttgtgagctcttataaggggcctaaatgtggatcttggcgcgcgcccgatagtgctctcgtctatccctgtctcacagtatcacttcttgttcagttttccgatttccatccaatattcatcatgtatacctattatctaatgaaattggtcctagcccagaaaaatagcatgttcaattgtaaaagagattttcgtacggaagccctcggtggtcagtagattgaagatcgcctaaatggcgctctaaatcgatagaatggttagactgattgctgataggccgatagatagcatgcttttatttaaattgatacttctcattctgccaaatatacttcatctttccaaataaaagaaattgaacgattaccctgtagatagtaaatatatactgtttgtttatgtacatcgaaagaacctttcctttggtttttgctggcatgttgattgttaaatcctactcttatttcctgcgagtctatctcatcttctagtaaaaatcatcaaattttggaaatggctatctttcccacctgatgttggatgttgttagcaaacaagcttatagacagggtaagtttcgagaaatttaatatctcaagttttggtctatcgatttcccagatcaatatgctgtgattccccgaaatgtcaaagaaactgtttaacatgacagccatagggagctacgtatgcatatgacatacggtgatagaagttgtgctaatagaccgagcccttaagtcatgctgttaattgagggtaataagatttagttcaattagctatgttgagaaaggttggctagtcaaacctgttacgtaaccatttatactattacgtatgatccggataccgttgaagctatttattaagtaacgttgatattttgggtagttggtgatcctagtgccagtatgatttatttaaaggctaaggtataagtgaaatatgagagagtataaatattaggctaaccgcctttatgagcccccctttctactaaaatacctgagtcctatccttagacagataacctaaaacgcgctactcttaggaattagcctgttttgctagtatatacggtaggaagcccctactccgcaaaccctattccctggtaatatctctaatagactgagctagatatagctaggagttaagtatcttccgatagtgggattaaatctaacctaggctaaatgatatgtctactaaagtcctaacgactactgtgatgccggaaacagtgccttatgtataaaaccagtacgtagattaactaatattaccgacattgctatatttataggttaatattttcaagtactgagagttttttatgtgatataattacgagctaccctactgttgacctatgtgtcggagacgaaatggcgtctacttaaagtatgaagataacctaaacgccctcttggaataacgccgccttacccttagctttgataattctaatattcacgctgccaactgggagtatggtagaggctattataacagcttatattcctacccctatacgaatcgggcctactataccggttgaagggtctggaaatgtggtatggttatcgaccactcgatggctgactttatgctatctactcctcctagttgttaaaataattgatgaacgtcgatttatttaatttgcttaatatcctccatggaggagtagaatagggctagcttacgatatctgtctctatctaggaataactttatcccctgttatccttttctgtagtaagactgaggcaaaaaggaaaataaaatgttggatattcaaggggaacagtatctgaacatattggaagtaggcctattaaaatagactgaaaattataggctattttatgatactgagtaactgtacctcaactttctatattttaattgacggtaatagaaatcccaattaatagaggtttactgtaacctactataattgcggtaatttactactatacttaaagatctaatgtcgttatattgttactaatagactgacattgcgaagacgaaggttatgtgttaaaataagatcttagagctataaatggttctttgacccttgtccatccttgctatattttttcacgccgcgaagctaatatagcattataaatcgcgctaagactaaatacagccgaccttctaccgtgtggcttaataagtcggccttctgtaataagcagctgagtctaaacttaacggcgtctctgtatatcctaccccctacaattcagaaaacggctaccgcggtaatcatacctagttcaataaagccacacctaggtcgcctaaacgcaagcattctataagtgaattaaaacctataggatacttttgaacctgatactggattatcctaagatcggtctctgatatttacccgaaataagtcggaaaaagggaagttggtatatatctaataacttgaaaaacagttctctcccgctatatatttcctagagctgatggaacaagtcggctatctaagcttcctaaaattgctcgaatgttactattataatgctttatgtatattgatttaggaactaacggaagtgtcagttagccatattctagcctctagctgctcgattactaccgataaactcgttggaattattaagccggtaagccaataaaatctcttataggtacattcgaaattaacttggaataggtattagaaggaatctaatatctacgtgggctcaggcgagcactcgctaccctaggcccggaaataatcctacttacgcagtctggtgatattaagattagtgaggtatccgcagatattgcgaaaattgataaaaactgacttttaatagtaggcgtcgagaatagctgcgaaattaaagaatcggaaataaatcctgtgacaatgaaattatgcgctctagccgatattatcacgaaattgatgttgaaaaatcgtatatacgagtaggaagcggagatttagaacttaccttactagctggaaagtatctctgtcgaagaaatcttgcaggtaagtttatgctgtcttatcatattctcggctaatatgatagaacgagatgtttacccgagatttatacgaggaagagttgaaattgttagtcagtgtagctaacaagactgcctatcacagtatcaaatcttactatgctcgttactgaaggacaaacttattagcttttgctcggctgttttttgaggcctaccaaatcgagaaggaacccgcgatcctattttctatctgtgctgttcggacaatatattattggtgtataaggaaagctaggtacggtagattggtagatggagcatggttccgacggtggtagtttgcaaacgctctttaagcgaacaaatatagtaggttcaggatagccccgactacacttaatttgcgacctgttattataatcagttcttacttatatgacccatcggtattatcaatttatttgtatatttttgcattcgtttatcgcctacttaactagggtctatgtaacacaaggagtgcgttgcttctgtttggatttgagacataatcatacccgctgggcaaaatactatcattatctcgcagatgtgctccccgctggaactataatactgaaaccaggtttgtaatcaacaaagagaggtgaatattattagactggaattttccacttcacagacgatctggattgagctagatgggtctgaacgctcccgtctatatatctcagcgatgcaggacccattgctcatcaggatctttatacaagtttagctaccctggcagccatacgaacaaggcatcgagttggcattttcagtggtggaattagcctcgccggtgtcggctgtatcggtgatgggaattgggccaaatgtaggatttccggtgcataccggttcgccttcttgcggtcgatatttgctgtcgccattatattcaacaatacttccaggccaagggaagtgaatgtctacattttctctggtaatacagccattcacactgcctcccatcaagatttccgggtccttttacagggcatcccccttcgtaggacttgataactttccattccgaattctttatcggctcgcgatcactagtgaggctcacctggcaggacctactgccataggtggcactgcccagaagcttgatggaattattgctcctagtccgataagtcgcctcttcagtcagaacgataaagtcacctagggatatcttataaggaaagtcactaccatctatagcaagtagcgagttgttaagtgtctttctactagatccgtaggattcgggagaggtcattctcaggtacatataggtcagcgaaaatacaactgcctgtaaaagtagacactatatcatccgaattctttgtcggctcacgatcactggtgaggctcacctggcaggacccaccgccatgggtggcgctgcctagaagcttgatggaattattgctcccagtccgataagtcgcctcttcagtcggaacgataaagttacctggggatatcttgtaaggaaagtcactaccatctgcagcaagtggcgagttgtcaagtgtctttctactagatccgtagggttcgggagaggtcattctcaggtgcgcataggtcggcgaaaatgcaactgcctacaaaagtagacactatgtcacgagtattatagtaaaaggggagatggcctcctgtgatcaaataccggttagttatcatatagctgaaggttatactaggtttcgctgccgcttatatatctccgaagtatatataaatgcaaggacgcttgaactattaaggctgctgcggttatataagtctatcacaaaaccatagtgtagcctagttatactgttcttttagcttaaagtgcgctgtagtaggtagaaatttggctttcaagacaagactaatatgattctaccgattaaccggaataagtggtgagcctataattgtgataaaatgtccttatatctgaatagaaaatagagttccccgtttaagtaagtcgggtcgacttactactccttatacaatctggcacgaatttaacgatagacttaactaaccaacattccctataaagactaatactgctaatattctgtccctatattgaatttcccctattataaaagtacggcgctcgctatggaccactatttatgtcttaagtcactacaaataaactcgaatcctagaattacccgcttaattcctccttgattttatcctcctacttcttgtccgctctcagttagagttagcaaagaatctcaatatggatgttcaacctaaacttaaaactaaaccagccgatgtagcgaatcaaaaagcatgtaggagaagaaagtctctttttaaaaaggcctctgagtatagctcggaatacgatgccgatatctaccttattcttcggatgaagaaatctaggaagatcttcgttctggtcttaaatataaaagattggcctctttcctaatattaattagtaagttctctgtattatcgatctcattgttagaaaggtactaaattgatttctagaagtactattatcctatacctattcaaatgtctctaagcgacctagagtctaagctatgaatctctatcttctatactagtaataagtattaccctcaattaggtacccttatagggttatcctgattgttcagctaagccctttacagcttatatcccttataaagtcattcccccctatcacttatatataggattaacctccgagggcttccgttgtatcctatgaattataatatctgcgctacgccccgaagattggtcagagtcgattaaccttattatttatgtctattataaatgctgcggaaatgtattataaacttagttgattacgttaaaggatataaagatttacttccactaaagggactaacgatgaatttattatccgaaatgtaaattctttaggaattagaggtaaataaaactctattacagtttaagatttgcactcgcctagttagataataattgccttgctttatgctaagccttcccttagcttctatgattattctaagtataaattttaatatagggcctggttacttaattaggtttacctctagtggcctaaaaccgaaaggcatcttggtaaatattgttggataacgaatttgcgtctagatagtacgagacttgtttgatgatatatcccttatatactctattactgatctgtatatgtatttcctattctattctatcctatgagtggcctatcgcgccgaccgacattaacgacattcgcttaataagcgaagaatagcatcctcttaggcatgatatcaatcataccgtctaaaaagtcttagaatcaagcgccttagtaaggatatcgctacctactaaccagtaaggttatatggaattatgcctatctaggataaaggtataagatccctgtactgctattaatgagccgaaataaacgagtagtactcccttatggaatgcttagacattaaactttggcgagaattgcgataggctcaattctagtgtaggcagggtttctgaggagctacccggaagggtgtttaagtggccctctgatagtattaccgaagaataaatgtctctagggggtatcatattcttactcgatgtctcgcctagcgttttatcgtatctatagatgctgcttagttgtaacgaacgtggtatatcggtttgggttgctctagattgcaagcttatatctggtgcgataactggttataaagaggccatgctaaaaatattcttatcgtttgatcgacggctgtcctcgggtctatactagtagatataggggttcgtacttgttagtaaccagagacggttgagtatagagaattctaacttcagcttgacgctgtataccactgtcttaaagcttacttgaatgtagtgtagcttatactccgcgaggagtagtaagacgtttaggattataacgaggatattgatataaaatagatggataatagcgttgcggccgtcgcgaccgcggattataatggtactcttgaaatgatataccgctttatatatatatatataccacagataacgaagtcttatatacaaaaaactgtcgattagatccagtcaaatatcgcggtaggacgagtaaagcatatatcgctgcggttgaggccgaagaaaaaaacggttattggtatatataggatacaagcgtttgtaatgatcatctatagaacccactgtacctttcttatgtcggagaaaatgaggtgtagacgcgagtagaggacgatagcttagccggtaactatggtgtaccatcctattataaaggggatggacgtcgggaggttagacgcctgagaaataaagcgagctatagtaggaatggtatatacgagaattccctaggatgcaaattgtatactctagaaatagaggccctggtagcgcttaaatgagtcgaacgtgataatcgctgtttctagggcattgtacgcgccgatagagaatatagatacgatctagatgatagagatgttctctatgagaatggccccaatatttggtagtaggctggttatgagtgtatctatggtctaataaggcttaacaggtataaagagggctagaagtatagaggataaacgattaacagcttggtttataaaagcctctcaaaccgaaaactgcccttgcaataagatcatgacatcgtagctagggggctccttagaagctctaaaaatgtctagactcttatcggcttagggggaatatgcttggttggattgctagtggtctgaatgggtctaacgggtaagttagctatatcgaaactagagtaatttgtagttgagactgaggtatacaattgatttttaatctatgccacagttatttttgacgtgaaggaaagctttcccactattcctaagttatagggctagtttcacgacgactgcaaaaccgagggcgggatcgtcggcctatggctaatcgccttatcttgaatcttgataaatgatttccgatgaaccatggaaacgctggttcggggagaaaatgggattatctgtggataaataggatttagtttcgatgttatcggaaaccttactaataaactttctgctctacctgctttctaggtcggccgtggttgaagttgtccctacagtcataggagaatctagaagaatcgggtatgcttaccacgggcgtagtcttttgaaatattatgaggtagcactactgtattcaaaatattctcgatctctagagtctgaggacgggtagaatgagccggatgctggaaaaggagtgggaccgcagatggtcggcccacaccgctgactctttgccatttccgtcagccaatcggtttctcggctttttaggcaaaacctaaaaaaatatgcttatgtaatcccagctgatccgttcaaatccgttgaatgtttataagctgtctgctagggttataagaactggcgatcgaatctgagtagatagaaagcgcagatttcagttttaaagggagtatacttattagggaagctagtataggagaagatatataccttcttgaatatccttcaaaggacgagactaacgagaaccaacaggtcggcactcgacgaggactaagttattttcttgtgagagcaggtaggagaacccgaccatggattgctttcagcgtaccattcttttgctgggtacctgcgtgatattccaaatacctcaactgccgtacctgtgagggtggtcccttcagcaggaccaagcaataaaggtatgttgcataattactggcctgtcgagactaggcttgtggatcgtgtctggacttttttgaaaaactttgctatttcttctctcgactataaatagaacctgcttgatctattgtcccgtgggtcatcgacgagttttctatcacaggaccgtaccagcgtcggtccatattcacacgcggtgtttgattggccctacaagtgcttcctttcagctaatgagccttgatagctgaaatgcctcaaatggttgccctggaaactaagcccaggttcctgttatggctttttcgacacgatctaaagtctcatagtcagttatggaaccatggtgagctttgaggaatgtagcacgagtggcaacggttggtgcaacttggatcccaaatcctagttctataaaacaaagccctatacatgtccttagttgatttctggattgttttcttctctgaatgaaatggatgtctttatggcctaactttcggaaactgttgtaatagtgggaccgtgtaaatagtggaagttacatctaggacaatagtacaactacaccacatatggctgaggccagagagcccttcttgtttctaagagcggctcggatggttcggctctggtcgatactgaggcacaaccgtatacctcaacatagatcccggtgcgcggcggtcgatcactttctctacaataaaaccgcagatcttgtgcttttgcgctagcgtaccgtggggcccctgtgtgtcaatgggtacttgactttcaggcttatgatgctgataccgatacagctgcttggcaggggggaggtcacgcgtttaccttgtttcagggcttttgattgtctccccctaaacttttaaagtcgagactccctgaaggccactgcgatcaatcatttcttcgctttgcctagtgtctttctaaacctgcaatcactcaccagacggaaggattcagtatggcaaaggaccaaaagccttcccggcgcggtgtagaccgcggtattgctacaatgaagctcggtactggtaggtcatgtgcctcttcgctatgttctgctcggtcgactgtctctaggtctaaggcggtaggcaagctgtacaaagggctggtaggtcaatctctgtttcccatttcctcgctcgagccttgttgtaaccttgtgctttatcttatcagtaccttaatgagccatcttgctgacgttagcttttagggacattctatagcgaaacgcgcccgaaagaaaaatgatgaagtaacctatcaaaagtgtttagctatgatggacgaggtataagaggagtgccagttagcccttgaagagatagataaagagagagcctatgactcccagtcgatgtagcgtctgtatgctgaaaaggcctaggagatatcgaaactgtaggaggctatcacagtaaaaggtaaagccttagctgagaaccagaggcttgaaagagagctctgtcaattgtagtaggcgaaggagttattgtacgccacaatgtagggcctggtcttatggcacgatattcagcctgtcttgtattaaatatatggcgagctggtatcggcgactactcggttctggaatacgatcgatgccctttagaaccataggttggtatcttacttgcctagctccggagggatccatggaaattggcctgagtaggatgggccgcttggcactctaggtcacaatgccctacctgggttttccgcttcgagtgattatccgcttgtaacttaagaggcgccagttctaatcaactaatattaatcacttgtgtgaaatatggtaaattcagcgtttccggcggtcctggctttactatggaggaaccggctagtcggtttatatagccactacgtaggtagatagctcatgagattatctttagtaataccacagccattctatcataatagtaaaaatgaaaaataaatggttgttgtccgatgttctgctgtggaaagaatattgatgtaaatactttgacgattagactcgctccgccaagcgtagcttagaaggtagagagaatgttctatggtcgctgaatgtggttagcggtagggcctacagcctggggagatgatgcgctgatctgtcggaagcaaccgaatctgactgatcatgaccgtggtccctacccagtatttgataggcaatatgactcggcgacattcatgaagaaatttggctgtttccttggtgcttggttcacatatgcttttcttgccacttggtagataataggattttaaacgatagcctacgacgctggcacgaactatagtatttttctggtccgcccacagtggccgaaactcaattgagtaggctacccgtgggtcatgagatttggaatactctactaagcgtacgacagctaatctatatctcaaattgatctactactgaatgtggacgtgagggtccagtgggctagggagagggtagtcgataaaatgatacctaggcgcttgagaaaccttaatggtatgaatcagtttataactgttactggcgaggccagagaattcgtcctaaggaattcagtttattataccggaattatagtaaatatttgtctactttctgtagccttacggttagttatagcttctagtctgccctagtgagatatgattggtcgcgaagtacaatgcgatggtgataccttagctaataaggctgataacaggctctccgatatattctacaactatattatatttcgatctagatcactgctgcgaccgaagggttcgcctagttgtattatcctctgtagtactgttcttcccctctttagctattatctctatagctgtctctacgactgccaaccgactgcggatgtcctccaagtcactgcgaatagttgtaatccagctgttagagttatccaatgctttttgtatgagcctgggaaaagtcagcctttgttcgttctctgatgtattgtataactaacttcgttcggatatctaggctgattgttgtaagtagatgtattacaaaatattattataggggggtaaattcgcactcactctgcggtacattgtaaggcgattatattgcagtcctccgcgagattagcctatccgggttgttctagttcttcttctggtcgcgggcctatactctaggtgtatggaggactttcctggccatcctctactacgatgtcgttgtggtggttgccaaagaagccattctcctgtaaagaagactcttcctcagtggtattaccttccgctgaccctggcggactctagatattctcggacccggaggatgacagggatagtgcacgttgtaatcggctccgaaagctttgtcgttgattagtgaacggaatctttcgaatccttcctatagttggatctgtgttaaggtaagataatgagttctcctagctagatgttataggagaagttgtataagctgatatgaagagttagttctctaaaccggaacttataatcggggtgtgctaggccactatgttatatccgtacttacagcaaatttcgcttggtttggaatacattcagctaattagtcacgatttttattaaactttaggggaatgaactttgtaggaaggcaagttttgcctctaaagtctgtttgaggttacattattcagtacccggtggggcttggtctgggaactcattgctgtgttcttttgatgtacagtaattgtatttaagaataatttctaggagtatgaaattgacagttaggcgttcttatagctagggattgttttaatacagatggcttgggggagcctgaaatacgaagtcaataattcggaattcagacttactgaaccgattccctagaatgatctatgggttatgttattgagactttagaagaatttttgtgaaccaggggtactatcttaactttttacttggatctggagaggatttatgctcacttttcccctctattaggagcttaagtcgtgctattgtccgaaaaggtcgttctggttactgttagttcatgcgatatgtccccttgaagcgaggtggcctgggtggaatgggaggaaaagaaccttctctcctggctggacgcttatcgggcgctgccgtggaaagcccgctcctatgtatattctgaacaatattagatggaccgaagcgctgagtctctgcgaggaaaaaagtactatattctgcgtaagcaacgtcgtattagtgcagaccgcttgagtatccaggctatctaagccatctaagccgagcaggagcttatcgctcggccggccataaggctttattagcgaatcttataagcagaaggcctgcgcaaagtaatattgaaaaatggtttcaaacaatcctaactactgagactagctagatcgatagtattgaattaataaagaggaaaggttcgagactaggtacgaactaatgtttactaccctttgaccataagctaattatatatcacaggccgcgcgataccattactctgccctttacggtgtgaagaaacacgatcgtcgacgtagatttggaactatgtatattgtgtctgtgtagctaggaagctgagataccgatgagcggaatatccacgctactagcagttcgttggtatctgcgctatatcgcgatctcgaagtagtaatagtaaatatctcgatgaattagtgctgttggatgttgctacgaacggggaaaatggcaaatatggcagctgagcaatcaagctactgtatgattgttgtatgtacgaatacacatattatcaaaatataaataagcaccattccttggaattacgataatagcgagggagtaccaaggttatagtttgataaaagttagttccctagagatcgtagaatatggccgggattgtcgatcgatcgccgaacctggaaaataaagttcgataagccatggaaatgctccctcggtgagaggatgcgggaggatgcggctgtcccgaatgatccttatggaaagcttatctaaacagcctctgctatacttgctttgtagattgctagcctaaaaaaaaagagatccggagcaggaccaacaaattcttatgctgctcatatataggatattaggaaaggaatattttattagaagatactgcattcagcgtcattctcgagatgggtagggtgcttggaatacaggttaggtgccgcaggtgggccggcccacagaacccactcctgggagccactcggttttcgggtttagttcaaaaaccggagatatttacgtaagctcatgtgatccactggcattctttctagttataagccatctgctagagttactagactggcgatagaattgagtatatggagaggaattgtctggctcgaagagagtatagtataatcattaggggaaaacttggtgtaggagaagatacatagcttctagaacgttctacagaccagataggcaaagttctgcttcccacttgataggggtacttactttctaatgactgcgaccaagagaacataaaagaatacaaccacgggtcgggttgtagcctaccattctgtcgctaaagtctgtgtgttcttccaaatacttacctgccccagcagtacttcctaggcaataatcccccgtaccatcggacactgatggccgaaagctttgggcttgtggatcgtgtctggatctctgcaattcgttccagtttctctgcgggcgataaatagaacctccctgaatctactgtcctgtgggtcgtcgctgagatctgcatcgcagaaccctacctgcgtctgtctaaattcacgcgtggtgtttgattggccggtcgggtgcttttcgcctccagggtctcatcagtgtaatagtagcgttgcaatcttgcgaggggtggcgatcacgagaacctagttcgtgggcttggttgcatcagttcacatggttgtcctggaaactagacccagtttcttgtctgagcttttcaaaggtctagaccctttttggctattatgccaaagaaagacaatctttatcctgagtttgaaagtatgccagtgcctatgcgcccagggagtagacattttagtaaaggcaatacaagttaactgcgattagaaaggaaagaaataacattcagcggcgcgagcctagagatggtagtattgattctagtgagaccgaaaggtcctccggccaaccgcaggtacagcacagcgtttccgtggctatctccagcccattatttcggcatctgtcgaagcacttcaatccttatgaaagagacggtgactgtggttaaaacggggagatatagaatgcaagcgcgttgagcgatttaattgcaaattcggtgatgggtacgaatcttactttcgcggtattactttctcctcaacagtcgatgaaagtgggccatcagacctaacgcacaattttgagaggaataccaggtcgagacttggctctgtaggccacaaagtctccaaacacccctttaacgtcgttgaaatcgcttcaacgcttattaacgagaccgtgactctcgctaccaactgcgcgannnnnnnnnnnnnnnnnnnnnnnnnnnnnnnnnnnnnnnnnnnnnnnnnnnnnnnnnnnnnnnnnnnnnnnnnnnnnnnnnnnnnnnnnnnnnnnnnnnnnnnnnnnnnnnnnnnnnnnnnnnnnnnnnnnnnnnnnnnnnnnnnnnnnnnnnnnnnnnnnnnnnnnnnnnnnnnnnnnnnnnnnnnnnnnnnnnnnnnnnnnnnnnnnnnnnnnnnnnnnnnnnnnnnnnnnnnnnnnnnnnnnnnnnnnnnnnnnnnnnnnnnnnnnnnnnnnnnnnnnnnnnnnnnnnnnnnnnnnnnnnnnnnnnnnnnnnnnnnnnnnnnnnnnnnnnnnnnnnnnnnnnnnnnnnnnnnnnnnnnatctgcgacaaaaagtccctctagcccgtgcaggcacctcttcgtggtgctagggaccagtattagagtattcaagagtacccgaagaagcaaagacctgcgcaacatcttcatcgtctgttcattgttccgaagggtcatcattggatacatagaaggagccctagttagatcttcgtcgattcaacagccaaaatcataaactaacaaattgaagcgtcttcagtatcaaatgacgtatttcacatttttttcccttggtagcttgtgatccaataacttcctcgctacaatagaaattggcatctttcattcagatgtaggcaaacagagatgagtgttgtctaggaacgcttgttgcgttgaaccgttagcgttgatgtgagtgttgatgtgagtgttgatggtgagtgttgatgtgtgtggtgattgagcgcagaaagcgaggtgacggtaggatgacccgtcaacccgttgaagcttggccaaacgttgtcaacgctcaatttgagtgatgaccaccaaacttcgaagataaattgtgtttttttttttttttgttctattttgctcttcgttactatccgaactacccattctgcaatgctgtttgccgggtttctgaggcttccaacgaaagtggaagaggcgtctagttgagatatctctcacgccaatgggcgttcatatctggccctcaacatcgtcaggcttgatcagttttcccggccaactcgttgacattcctcctctcaaatacactaccaagcgcccgctgaaaataaaagcaaattctattcagaagctgactgcgttgattgactgatgtggggatcgtaaaactcagtctatagccgcctgcgcctacatattctataagagataccaaggctagttggaaacagtactgtccagatccttgagtttctcctgtggacaaaatggactccccaaacagctcgccagaccaggaaaagcaaggaaaacagcagcccaatgaattgccaatccataatgataaggaccataaactggaatcttcagatcatgtccctccattggtaagtaaaatccgtcagcttcgaattctttggctgaccatcgtagccctccccttcgcaacacgaagaagcaacaagacataccttggcgaccgagccgtttcaacccacgttgaaggtgctagcagacctcgaacgcaacgatcccaagtttgcctttccagctgctcgacttgttggactctaccgacgcctatgggagtcatgcgtttccaagcacatcgatgtccaaaagattgaccagagcaatgggatcttgaaggagggacggaaagctggagactgagcattttttattcctctcttatgaggacaaactaggggaatttataaccacatgctacagtaagttatcgaatgcgttgaatgtatcaacagcgtgcaccgttggcacccgtcaccaacacaacgaaagttcaccggcagtataagccttatctctccttagggaagacagaaatagatagcggaaaaacaagtgtcattattcccccccatagacgctctaccacatggacactttaccaaggctcaggctcatcgacagggtaggcttgaagatcgctcgctttaaaggctgaaacaacatcattacaaagagcctgaaccgctcgcttgcgctccgacaatactgaagcttgtatattgcagagctgtagaaggatatcgctatcgcttgctaacaagtcatttgacgcttgaagctgtcgctgctcctcctcgagtcgtattttctgggccgatttgacgacgtagcattcctataagtaaaagtacaagtcgagcaatttgagggctggtgtagcgagggagtcattgaggcttactacttttatgaactccgctataagggtacctcgtgttctcactggaacctattcagtattagtgggttttttttatttccttcctagagggggattgacctaccttaggtttaatagttgtgccgtttgaagcttattgtggttggttttccaacttgggtttatcttctggagcgtgagatactcggcactgtctcttggctggccgattaatgggggaaggcgaagtgggatggtccattttggtgaattggatcagaaattatgctcgaggggcatttatagctgataattcatgtgaggctactgttatttctactagtgcttccttacctagggtcgactgcaattttaaagctagtgaacagttagcttaaccgctgacgctcgatctcaccacctgctgagagcaaactgcttaggaataagcgggattaaatcgcatctatagtattgacacaaactaatacaaagtctatcttataatggtagtctataagtgtacttccgatgtatggatgctataaattactttcaaatcattgaagctttgctgtgactacaaactattcgaagtgcggaagtaaagataatttgattcccaatcttgatgttaataggcgctgggaacagctatctcgcaccacatcactagagctacctgaaatagatgtcgctagcccttacaaacgattaaatattctcctcggagaccgttttaacaattttttagtcgtgttgttgttataaattctgctctggatggccctctggatgcgatagtcctttactagatctagggatctcctcaaactgaagtgtatcagtctgggattggccacaagtgcatcaataatcgagaaatgtccacccctgaccgctaacatcaatggatcctcgaaccattgattccttaggttgatatcaattcggctatggcgtagtatttcccggactatctctaggtcaccgccacgggcagtaatgcagagagcagtgtcataggttgcgacagtgcttttattaacatttagacgtgcgccttgctgtactaagagccttaccacatcgagatgactatgtgaaaccgctcgataaatgggcggatctattaaaccccttctattgatctctacgccctctatactcagtaaacaagcaactgtcttcacgtgtccgtgatatacagcaacggaaattggagagtggcctgcaatgcagagattcagagcaatccctggcactgtaagcagccgttgtagaagtatagtatctaatcttattgcggtatggtgtaaagatgtagacggggactcaagtctcccacggcctctaacgaaattaatgtcgatgtctttctccgccaagagcctttcggttatctcgtcgtatgacgagtaagtagatagccaaagtggtgtattactatctttgtctttgcagttcacgttggcaagggggtggcccaggatcaaattgactatttctaagcgtttggtttgaacggcgagatggggtggcgtatagccattccggttctggatgttcgaattcaggcccttttgcctgagaagtcttttgacagcctctactgacctataggccactgcttggtgaataggtagctcagcctcttgtgatgatttggtactaagaaacactttggtcatcggatcgtttgaaaaaatcatttctatcacgggtctattgaaacgacatgcccaagaccacgccgactggcctgaatcatcttccaagttagggtcgctgctacttaaaagtagcagttgcacgaatcctattcttcctgcgaagactgctaggtgaagcgccgttcgcccgtatttgtgtttaatgtccacactggcggcgcggtgctctagcacgctcttgacgatggagaaacccccgtagtggatagcatatgacagggggctgtcgcgcgcttgattttggatgttgatatctagatctcgatggctgagcagcagttcacgcacagcagcggaagtgtatttcaacgcccgcatcaaaggagttttgcctcggtaaaatgcattgatgttggcgttatgccggagcaaagcctccccaagaccaacgttgtcgtatttgacggccaggtgcagcaggttgctgttctgaaatttgatattgtatctccagatgctgggctgcagtttaaaatcgaagtctttgcatgatttttcgagggtaaataatgcactgccgtccaaatgtgacacaatccacaacaaaagctcgttgggcagctctgtaaggttttgctgcaatgtattagctcatcggtaaaatcagcaagaaatcaaaacagaccatgaccggataggattggagctaggaagcaaatgaaatgtaaatgtggctgaggtctgaaagttggacgccttagatatctccctcagctaaattctgtggtcagctagaagtgtagcccgtcactccgctgaggcgcgtagcaaccacacggcagcatcaaagccttgacaagaatgtttgggcggcgttgaaggatctctggcgtctagctcccgggaacgccaaatcagttcctggttatgccgatagcctggagaccgaatctaccttggtacccacttctcacatctagcgccataagagtaaatcatagcacataacgcgcatcaaagttccataggcaacccagaatttcacccagcatttgtcgactttgcggctaaccgcagtagatagtctgttcgccaatacatggccatcgcgatggacagtcacaagtgcagctgattgcagcagtggtctggaatgatatcccttctcgcaggccactgattggccgtatagtggcgcatactgcgtgcgaatgcattctcggacgtaccgactgtttcaaggaagtgttccatgccagccacgtagccatataggtaaggagccacggcgatggcatataaagctggcgagggaacgctgcaagatagtccaacaccaattcccatccgaagcattttctgcctttgtccaccacctcaatgtccgccatgctgccttggaattcgcttcttgtttgtgagatggaagtcagccccaatggtggtcctggcttctgttgcaggatgacgaaaaaaaggggctccaaccaaaaactcggtcaaacgtgaagacaccaagataggccataaaaagctgaacactgtggccagagagctgtttgacctgtcaaacttgcaatcgaagctctgtgcttttgtcaaagaatctctctgtgcaaggtggcataggcaacgacaggccgatggggttggccagcagtggtatgaagcagctgtccgcaaccaggcgcgagtgtcacatgactctagagttgcatctccatccattgtgcatccgagccagcgtcagacatcgccagcctccaggcgacgccctgcatcagacaacactgaccggtcaccacctcacgggctcacacaagacccgccggggcccgtctcaaccagctccgagctggtgcaatcaatcaatcccgctgtcactgccgaaatgctgcggaccaacggtgttccatggcacgtttcgccagctcgaccagctatcctgacgtctgtcactaatatctgggcgggtgtccaagacttgacgctccagagtctcagcttgagtgaagagctcgaaaaagatccactgtgtgttttgtttggccgaggacgaggaacaagcaaacgaatgcgtgatcctgtgttgcgatcagtgccgagcgcatgcccatccatcctgcgtggaagagtggttggaaaagcgacgtacaagctttggcacgtcatgctgtgtgtggtaagtatagatggtttcaattccgtaatgctgggatgctgatgaatgctgtcgaaacgaaggaactctagacgcattgattcgtccactccgagtcctcttggcagataccgaaacaaactctgtccactcggcaagcgaatcatcaaccgatagcgagcctgtcagcgtcaggagtccagcacgaaacgacccgagtcagagtcaatcgcgtcgggggtcagtggaatccctaggggtatcaatcgagcagagtgggccccgtcgctcagccagactagcaggggctcacctaccgcgagattcttctacctctgcattgcttcgccggtcggcacgactgaattccaatcagcgtaggtgattacaatctacagaaaacgcgccacggaaatgggaaattagcgaagcagctgtcaatcacacgcgactccatatcctggtgatatggagttttggagcaagcttagcaaccaaataaattaaattccgaacttcaaaccccacggcacactacgagatcatttcatatttgcaagtgctagatgtcaatgtaccttataatgttattcgaagtctgcttcatttcaaatatgttttagctcgaaacagagtgcccgtatatactgtaaatcatcttacataccataccctagaccctagtcactctctagaaacataagcaaaacattaccgaccaagcggtcattagccggacattgactctaatatctatccaaggcatgaatggctccctttcacgatgtcttatctttgactggacttagaggatcgaagccagcatgcgaacgagagccgacaagcaccattatgatgataagtcctgtcgagatggacaagggatatggacctggctcttctagaattggtattgacaacagcccttggctgttaggactatttcacaagaccttactcattcaaactcaaagattattcctgagagcccatttggctgctttgtcataatgaggattccatgaagtaccctgcttcgcttaatcagttgataccatcaacacaatcagccagagataaagataaattataaaacaaatcaaggggaaaagccatcttatgcccaccaagccctagctatttgggacccattctcataaataatcccgttttgttgagaaagttggacttcatcaggcatagcatcgatagcgttcacaggaagtcggtctccgtccccgggattgggtctttgcctgatcgtacctgacatatttcagagggtagtccattgaagaccttccgaggatgttgcattcctaaactatgcccttccttttcagaaacgacgcgtctgggtgcccgtcgtctgtcaaggtgcgccgcttgcctttggttcgcttcaatcatttctgatagcaaaccattctgcttggccaacaccaaagtacactgctcatcagagatatttctcggcgtagaaaaagcagtaactctaggtaatgtcctactgagtcatgcaatcgaagaatgggaacccggtgtcaacatacaatgcagagactcccaaagccatgcctatgatcttttctaacagttgtagccgttgaatcaagattcgcaactctatgtcttcgaacatatcaacgtcatcaccatccagttcgtgcagggagtggttggaggagtgactggtccactctttgaagccaatctgaaatcttgcacaggcatcttggccacccaaattgtcatccgaataggatgctggacttcaagatcaagcttgcaaagaccgcccaggtcaaatgttgatgcaaaattccctagtgcattttcaacgaaaaacaattgtcgacaaagctctttcaaagcctcatttgtacgcccagtagctttcatgtcttccaaaagcgcaagaacgctgcgctgcgcagcttttgcggcctgcgcagtggaggttccggtacctgatggttcggccattgtgagcgaagaactagagcaagattagttgacgcctctcaaccggaaaaatcaagggtgggctcattctagtacaaaaggatagtgcctattcttggtgtagattattgatggcctgggaatgatgaggataatgtttgaaggaggattcaaatatatatactgtctggagtaacatcacttatctcagggcttgttagatggttcgggttcctgggaacctgggtgattatgaccgaatgattggcctaaacaacatagcttgcacgcatctggaattactctgctgggctcttaggggtaaagcattaaagtcttactggttattcgtgtccttttcgtaataatctgttcagcgcaaaagaaagatgattgctcatataagccttttgatgcatgcgcttattggcgagagaagcggttctttgccgccatatcctaacgatctttctctagtactccctattccaggacgtatcgtaaatttcttagtggactcatccaatttccctagtaccggtagtcatccgaggcctgattagcaaagtattcccaggagcaattatcatagaatggtaatgctgattgcggtaaaaagccctcaaagccgaaccaagtatggagtacatgagctaacagaaaaaaacaaaagctgctaaatatagacgccaagcctgcgaaatataccgagcagatgcataccacacgttactgcacttgtatagatggacgtctgaagatctaggccaacatagaataccattgaacttactaactgcgctattacagctctcctaagtaaaataacctgaaataactgtccgagctcttcaattgatcttgtatcgttctgttagtgctagcagttgctgtattaaagctacggagttgaccgatgcatcggagtgggtccggggattcgggagatcgacaagacaacaaaccaaaccacaaccttacgcatgcggagtacaggatccaaaaggatccatttacggtcatattattcgtcggctgtgagaaccttgtaactactatcctgctgcctagagcgtgacctaaaaattagaatcagaggcgccccctgaacgccccttttcgcggttcaaaccccggttgggttcatcacacaggtgacttccttgacttactccctctctcctacctattaccatactctgactgatccatcgaagaacacgatcaccatttcaaaatgcatcgcctccgtgactccctgctgagcccttcgccaaaaggcttccccgtcatcggcgaggcagacaccgtctcccatagtcagcaggatgtgcggcaaagtctcgctcggggtgaatttagggaggttcggggagcagccttcttcagccgaacatggatcgtcaccgacaggtactgcaatgttaaggatggggtggattccctcgaaggctacgttcgtgagatatggtatatgtactaccatctcagcctacatacgtcgcatgaaactccagaacacgatagcctggtcctcgatatcctacgaatccagggaaagggaccgttaaccagacctgtgaaaggaaattacggaatcgatatcgcacgactgaccgaaggcacgctatggaatgacctgccgttcttggttaccgacatgactgacttatggatcaacaactgcggaccaatgtcgggcacccagcgcctgaactttgcctctttcttggcaaagttagcgtcaacccgcgtctgcaaggacagaatgtgccaggtcgcccttgtcctcttccgctgtgcatttgaggagagacaagagcttcgcaccagcgaggatcaggataatgaagatcctggccggagcatgggatccctcgagcttatgcacttattgccatctgtccaggcatggttcgtcgaggcaaggtacaattttttgcaactctcagaggtctcatggaatgattgccccagcacgattggccagggtggcccctgtttcatcgagtctgatttcgggaagcgttgttcaccgactgggttcacaccatggagatggatgtactggctcaagcgactccacgagattcaggatgcggcaaaggacgctggtgagaaacgtctcaagcagtgcgccgtcgaggccatttccagaatgctcatggatgtgaaggaacgaaactctgacatcttgagggttttcaaagatgctggggatctcatatacgaagataaacatttggtatctcttaaaaggattgtggagggcgaaggcccctttttcccggagaacgaagatggcgaggagagcgaaaagacagaggggaaggaaaagctagaggaaagcaaaatgccagaggggaacaaaaaggacaactgagtctccctctctcccgctttatttctcgggtttcatagtcctcggacacaatttgctcgcctctacccctattacttatgaaatccagcgccaagtcccctcggggtttcatattaaaagcaaaagaacagacaattacacttccataattatccatcaaagcacgcatgtttaggaaattgcatttagcattggactgtgcctataatcaaagctattgtacctatgatgaaaccttatcagcgatagatgtataacgggtgtactaaggaattaaattgcgggattttggcaggtataaggaataacgaagtggctgtgtgaaacattttgagaaccccagttaatccttaccgcataacagggaatcggcccccagcattacccagaccctgatttggcagtccggctcgcaaacaagtttgaccccgcacagaagcaagagtagcgctgctgcagcagtttgatagttatccctctagcctatttctgcttacaatgtacatgtgtcgtatcatagtactccatttcacttccgactacgatcaaaagatgctggatatattcgataatctacaaccatttcgttgatgagcaacaatatctagctagatatcaaacgagtgtctttatgaaataagaaacaaaattcgccgaaaattgaagctggatagatactgggtgtatatgtatcacccaccgagcagtccttggttcgagtccttgtgggtgtagggtagtaagcttcgagaatcacagggcatctcgcatatcaccaacaagaagggaaccaaaaaccattaaatgccctggtgatcgcagagaccatctagtcacaatcgacagcgttgttgtaggtgtcgacggtacatttgttattatccttggtgcactggaaaaaagagcgagattagcacgaaatcgattcagatggctacttccgaatgattgatattctaccttcttgttatcaaacttggggcacttgataaaagtgtcctttccagcatcgttcttgtatttacattcgttcttagatttggtgcatttctgagttgtggtcccgaaccgttagtcgcgattcccaagtgagtacttaaggtatgggatattgatgtttactcactccggtgtatttggccaggacaccggcctcagccctggcatcgaggtcgtttgatacagactcaatgggggtggctaccccgcccattgcagcgaagagaaaaagggcaactgtggtgatttgcattatgaagggcttgagatgatgatcctctggagaaggttaaagtggttgaagatatcgaaatgctgtgatttgagtgatactatatggaattgagggtcatgaagccgcctttataaaccagatcatgagctctgtgtgaaaggtgacacatacaatgctcaggtccaatgcagtcatcttgggggtggcagcttatggattgcatgacttctccaatgacattaatgcctcacatacttcaggatactggacctcttggctggtatattcttacgggtggggtctctccaaaatcccttacctgcttcagcctccggggtaagatgcactacttgtttaccaggaagatatttttgggcttacctagtggtaatcatttcctaaaaagcagagaaaacggctgacacgttgacacggtgactgggccactcggatctgcaaaggacgatggctgcattgcatttgataaagttgtttcactaggaaatgatctccaaatccaaaatgttggtatatgagaaggtttagcatatggcggatgcttataggtcgaaaaggcaaaggcactatactatgtatgtatctatgtgatactgtgatacagccaagctgtaaggcagctcccggttgtgttacgtagggctggggtagattcgagccaaagcaaattaggaaatgattcgcgggtagtatttcagtaacataagctcacatggtctaggcggtcaaaagttgcatacttcaaggtgggatgggtgggcttacagcgggatgctagcccttgaacaggggttgtcctcagtggcagccccgcttctccttttgtgtaacaaagtacatagtccgatcatactgccaaggttcgctcggccgaaagagcagacagtaagcgctggaagagtaaatccaaatcttttaagatatacaggccttcctacggttgagcttaaaacatgaagtatgaggggagtggaaaaggtactttcagtcagagaagagtattgttagtggtaaagaaatttattagctttcagatagagtagctaactgatttaatatcgcactgatgaatgaacactacggtcattctcgaaatcggcttgaccattacggagtacacaccactgaacaacccttttctggccccatcgccaaggccttagtgcagatcaattattgagcaggaccgcattaaattgggggtgcagcaaaatgtgctttgcatgctaccataaaatgctacgtacattacgcacttcgtacgaaaagctctctgaattccattgacccaacgtttgatccttgcaattacgactaggggagagatgtaacatgccttgtactgggagatccgccacatatcatccgctctctgtttcaatcgcacgataggcacgcctttctttactggacaattgcacccgttatcaagcagtgctagatcttccttcacctctcctagaccacgctaccattttcaatcaggaccaaaaaagtacaaaatacaatttcttaaatactttccacatgatctccgatgtagagcttcatatcacaacaaagcaaagcgggcttattagtttcatatatagctatttttacatgtatcgatattatgcccaatttgtctacacccgccacacctatgctgccgccctcctggaaaggtagtaaaaaagatggtcgcacatttcaatctcgtgttctcttcgcaggcctgctgactagagaaaacctctctcgcgctctgaagcctgctgattgggaagtcctgagtaggtatgacgcgcttcacgataacacgtctcttgacggagtgcctcagatcgggggtcagcgctgaaaggtctctgtaattaaccgcccagaaccattgataccgcgtgatgttaagttttcggcggcgttttccattttctgtgggttgttgttgaaatggcgattttccaccttgctagcgccgacgaagcccaccgccaggaaccgcgaattctcgcgcatttttcgcgatattggtttcgattgtttagaagggattcgagtgctttgaggatccgatccttgatttctctattgactttaggcatttttggcggagttgttggcactaaatgaagctttctttcacatggggtgtcccatttgggtgtcgggccctcgcatagcgagggcccataatttttgtaatttttgtgaggcccggttattacgcaagtactatgatccgcagaacctgagcgtttgggtgagcagccaacgtagagatgttcatggtcaggtgaatttcactgatgccgggacccactagaattccgtcgcagcatattgatgatgctagcactttcttcatcgtgggtcatagctgccggtccactaagctgtcgccgagttatcgctaacaagtgacgtagcatcgcctttatagtggggactaatttaaaaaggacaatgctgggtcaacgtggaaaaatattttgactacggatatctccgcggcattttagcaatgtatgttcaagccgttcctagagagcagagtttttctctcgggtttgttgctcaatgctatgcataatttctaccagtttctgtgcgtcgtctcgagtccgttccatcagctcattctgttcgctgatccattgcagtcgttccttccagaaatcccaccgctccttcgagaacgatgagtctcctttccatagattcaaatcgggctttttgtttgcttcagcaagggtgaggtccttctttcctacgaacttgaaaataatggaccctgcaatctcaaaaaaaggaaccatagcatgaacatcagtctataggccgaagtcagtatctcaagcacagtgatcatattcttttgcgacccacattcagcataaggatgtaattcgtagccacgcggccatctacaaggtgatagcgctgtaagagcgacggcgagggcggcggaagtggcaccggcccgtgtttccacggctcctgttctaatgcaaagacggggattcgcaatgctatgcttagttcgcgtgaaccagggccatgcggtggatatgcggaaagataatgcgcgcaaaaagcgctgctactgtgaaaagtgtaccacccttcaaaagggtagataccgtatcgcatttcccagtaacctgtaatcagaatattagcccctacattaaatcaacataaacgaccctctggaaggaatcttgggcgaaagccttgtgtccaaaatattggagagaatcaaagaatgggatggccattttgcatgatattttaggggaagaagaagtcacgcacggtcatgagtctcttcccaaatgtccttgaatacggccaagttcctccagtcttccagccgatcctggaagcgtgacgtgcgaacctgttcttcggttctatcaaggtctggaagagctcttattgcctctaccagcttcaaaatagcgggttgatagttcggcatctcaatagcagcatcccaaagtagccatgaaacgcgctcccctttatccacagcttgactctggcgctcttgaatcaggtcatcttcgttacgaagtgacatgaagcgatgagcagcgtcatctactggaactgcattggcagtgccgtaacgctcaacaaattcctgcaatatttgaatctcatcccaggttgggggatctgggtcgccatcctctgggtctggatagaagaagggtttccattcggctttgtactcttccattgttgtgatggaagttgtggtgatttgatctggggtcgccccagtcggttctgacaacgaaggcgtactttcaagtgaaagtgcttaggaacagatcgctttttcggggcagtatggtcatacaagagacaagcaaaggaggcttcgctggtggtcagacctctggaatcctaagttgctccacaatggatgctcttagcacccatatagtgtcttatgtatgtatcagcgaaaaatgctggccaagaagcgctatagccaaagtagttaggggtggattcgaaaagagatttgaagagtatattcgatttcgaaatcattttgcgatgtcattattcgcattcgaaatttctattcgaaaagttatgcggaagtctgccaagaaattggttacgtaaatgattggttaacgccagcaaatccacccgtgatttagcgtcgtcttgtcgcgcacgttgtgtataccaaatcctccttacatatggatctcgtaatttgagactcgagcctgtggatcttctcactatcgttgatagcagtatttattttccgcctacaatagataacacctcatcttaccttccgaggtactctgcaacgggtacatggtaaggccgctgaaataacgtgacaatggctgagtcagattatctttggtcttacaccaatactcccttctctctataggcggtgtgtcttgtcctttcgtacgatgtatgaagttagctggccagttacagtatttgcggataatgtttcattcagcatgactcaacaacagataatggaatcacccttagaattagttaaggcaagcacaggtcaggacaagtctcccaggagcaagatatctcctagaaataagaaccgtgggtcctgattgcgagtttcaaccttcaacactctcttttggccctgattcaataccacctgctattcttgaaacttggattgtccttcaaaagcccccagatgacatttgatctattttctacttcatttccacatccggcggaaaaaggccgtttccaaagacggcatttcttcaagcacaagttgaaaatccgtatcccgcatcaggatttccaaattccacagtacatagtctcccaccaactttttgatgtctcccatgccctcagtctcctcagaatcaatcttctcaaaaacaaatttgaatagaattacaatatccccagttcgttcctcacaaagggcgaagtttgctagcagccccagaaggcggttgagtgatagatagcatagcgcagtccaccccgttctgaaagcgaagcgatacatttcagcatggcaaagaaatatatctgcataatgtatttagggtcggtgctcgattcgtcgttggctcggtaagtgggattcacctgaccaatccttcgtgtaggtcggcacaaacaatagggaacttttctggatgaaaaaagttccaggtaagtctggcaggatcccatcgtctcacggattccgtcaatgattgtatgccgatgccgtcgtagatcggagagggggcggagtaatcaccagtatatacaaactcgcagcaacggccaaagactacctcgtcaatgtcctcgactataggaggtcgaagaatctcgcttggaaggagctatctaactccttatgaattaagaatcgctttcggtccttgccaacaacgaacaagacaataccagattccatgaggctatgtgaacaccagtagtaagaaccggtacaatgtgagagatgaggactgttaatgtacctatgatactcaagaaccattttggtagaagaagacgaggagtccgtttcaccagcctggggatgaaaattgtatctttgagggtcgtcggaagggagctgaagtagaaattgaaggatagaattgcttactaaatatagggggctttatttcttgagcgagcgcttctgaagggagaggagagatgaaaccatccattgtggcaagtggtgcatttatattaaacttaccaagtgctagctagcctaggcgaggaaagaaagtgatacgatacgcatggacggctgcggtactgaggagtcaagatggagatggactgcagcactaagcctgacatggattggtgctataacatcttgctcaaccccctcagcagcaagcaggtagttcagttctctccttgccgcagcacatcctctgatgcttcagtacatttgaatcattttaccaaaaccataaccaatgatgtcatctggataatcgaagtccacacactgaaataaaaatgagatccagttctctcttctccgcagaacatcgcagaactgcgctaggattcgaaatgagcatatgtggctagatcttcctcctgctgttgctgctacagctacttcggtacatttgaaaccggtcctatgaaagctaatcaggccacctagttatttgaattcaaggatctaatatattctatgcataacaaactagtataacgagtcattgcttagaacctgcgcgccatagaggtccggtcacagttgagtgagaatcattagcatggcgctgaaagtgcatgacttctgcaatttttttatcgcatacattgcaagcaataacagtgcttgatccaaggttctgtagatgctttcgcttgatatgcttcgaaacatctccatgcgatgagaatagttgcacacgcttcttgagggctaggttttgctgtcccacacaaataaagcaaaacaagggtcgattgtcctttgtgacagatcgaatagcattttcgagtgggcttgccgatttagtctggacctcagtcgtttcgctttccggcttctgatcatcgacgtaaccgctctcggccacatgactttcaacccttttgttctgtggcaaacgacatgtgataccttcctcaaattgacagtaagcggcaacagcatcaatagcttcagtgcgtcgacaccgaatgctggatgaggacgaccatgaataggaggacaaaatagtgctagtagttgttgtagttcagaggtatgaattgtattttattctagagggaaagatgaggttatatatacaacacggacttacaatgaacttggttgtctgtatagacatttcggagctaattccgatggtgcggcttgcttcctgatctgcactagcctcatgtcacgacagtagtatagaaatgtattctgatcctttgttttgattgccgctatggaccgcgaggctaaacgtaagattcaaagttgtatagtctacggtatccagcaggggaatctctggatcgtataggatatcgtaccatcaacaattgtaggaattaacaaggtggttgtttttatatgtgcttcaggggcggactttgatgactaatcagtcctgaggtcactacctgcaaacagtgcaaaatagtgtttgtttaacgtgtcatttccccgcgctggacaggatttccatccagcgtccagagctctgttttgttgcccatgacagtgatggacaaggcataccttccgcaatggggccagttacccgtcgagcagtatttgattgtgagtgttttgcgccactgttgtttcccctgcgtggctaatatctataaagaaacactgggatcactcctcatctgagcctactggagaccagcgcctccgactgatccgtcagttcttagatctagatgagattccgaaggaagtgcaccctaattgtcatgcctcagacacttacgaagcactgtcacatttccctacggcctatggaattgatactatccttcgcccctggcgctctgatgacctacggaagatagcgtggaggatttgggggtgtgataacgatcagttgattttattgcgcacctactataatgccgatgacaacgaacaaatcacggaattagtagggtctgatgagctccacgaggagaatgtagcctggtgggcacttcttgataatcccgaactcttcaattttggtgaccagtggtggcgagtcttcgatatcttgccagagttagccggccctttgaatggttatagccgcctgccagacccagaaagtatctcacgggagagacaggattttaaggagagactaccgaccctcaaacaaagcgacgaatggacggcgaatcgtgataattatattgaaagagagtttgcataccttcggcgaatagcttcagagggctatcttgctattgcagatcaggaagcttttgaaacagatatgctacggttaatctattatgatgggaagaggaatattgtccaagagacccggacagaattcgatgagcagacatttgctgatgttgccgttgaatgggaccagttgtcgcttcctatgcaattatgggaggacggaaagactggtgagaagtatcgagtgaatggggagctgggaagggagttatatcagctagatgaggctgatctggaataagcatggccatgtcgaatctggtggaatcgtggcacatgatatcgttcgtttgctcgttggcgtcatgtatttaggcgccgcctcttcaacagagggactcttcatcatctttatcgtcaattcaatcgtttatcgtcgttccaactgcttaaacatgtgagcgttactagcgccaatatgatagcaggttggaatcaacgtacagattctcccggaccccggctaggatgcgtattgacgggtcataatacatctggtaaatgcgtgcataagaaccaaccgggtacaccacaacacttttgacagccctcatgatgcagcttcctgtatgcccgaggtgattcttgggtagtgagctctcattggcttgcctgtgccccgatcttacccaagataaccaatgtcaaattgtaggctaagaatgagaagactttgcgtctccttccccttgcaggtggacttgtgctaacagcctgattgtctgcagaggtacgctcatctgccaggaagcaagacaaaacatcagcattcctgcgcctttttccacttctggaaagacatcaaatgtcatccgcagacaacgaggatcacgcattcgataccagcagcctacgccacttgaaggtatttgaaaggttgcatgcttagccacaggtatgattcgggtagtggtataggctgatcggagttcaggagttgtatcatgtagacaaatcgaacaatgacctgatacacagaatctagggagaaagaggccgaggtacgcgatacgaatattctggtgactcatcgtcgatagtagtcatgtggaagggacagagagcatgcgacagtatttgtataggggagctcgagcagacaagacatttgttcgcgtggcattcgacttgagtgatagaaatgagggtgtcctgttatacgatccgagtcagcaaggattgatctagttggacgagttgtcgtagcgtacctgttcatggaaatccccaagtacgctcgagacgggacaatcagtttgcgcaatgattatatcggcttcacaactagatcacttacaactttctgcaatgcagttaccagccatgccacgtcgtattcaagctcatcgtaatctgcactcgcttcaaaaaagccgcgttggggtgcacaagacaatttgttgagacagtaaacgcgcgttacgaacccacttgcgataaacattgcacttccatggtggatgaatgtgtcgcgatgccagaggtccagggactccatagctgtatgaaggtggtgggacgagggcggaagacgcgatgaagcacgctcgtcggccgctaccttggtcttatcttcgatctggcggaataggccactcgcacagtatattttaccgtcgatgatggggtggccctataatagcgtgaagatgtcagcggtgttcgtggttagaggaataatgcttggcgcggatggtcagacacagcgcagctgtaggcgttagatctcacttaccttagcatggaaatgggagtctcaaggttctatgcaacgaagttcgcacatggatggccgcaccctgttgttgactcgctatcttggtttgcgatcttctacctaggacatgctgcattgttcgaagcgacggggctaggaatagtgtgtaagccatggctttgcgtggagctctggggagctcccaaaggttcactgtcaattattagccagtagaccagcgtggaattccataactcacattttctgatggtcaagaccagggatgaagagtggcccttgctctggtgcattgtgttcgaacgtctacggatctggctgtcccgcgtctttcgggtcagtgcagtttcaaggatctgtgggcccatatacctacagtgtgagcagttgcacttcaaatatgtggtcaaccagagccgcgacagtagaccggctcgctatagcagagacctctttatagataccttgactagctaatccaaatcttgtatctccgatcggctggcgtaaatggggcagtgaatctgcttggaaccacgtcccttaaagtacaggaactgtctggtttgctggtctacggtgtatactataaatgtcagtacggtataaattccagtactcgatcaaaggggagaacttattgagtgcgtcagatataagcctgctcgactttgtagaatcaagtggataaataggagagcaattgcaggggtagaggacgtatttataggcttctcggcttctgttactcaccgacctggttggaagtgttgaaggacacatttcctaattgaggcctgttgaaacccgcgtcttcttttaccacaactatttgcagcgacatttttgatgccttcagatgcctagcgagagacgagtaagagtggtgctgagagaaaggggtgctgactcggtcaagcaatgttggctgactgttgaatccttcacgttcctcttaaattgaggctttgtgggagatatctaatccgtaatgacaggtatgtattcacatatttcttgtcctagtcacctcatatgtttggcgactcaacgttggatcactgaaaactcctacaattctgtccctagggatcatggaccttgtttctggcctcgcttgagtgttgtgttggtttgtgttgagctgtgggtctgtccgcctgcctagactgcagaaagcgaggtcatatacagtaggatgtgcggttgctcaacccatcaacccgttgaagcttggccaaacgttgttaacactcaattttcgaagttgtgaacaaccttcgaagatacatttcttttcttttcttttatttttcgtttctttccgaatatcttttttggtcactctaaggtctataatgctgtttgccgagtttctgaggcttctaacgggagtggaagaggcgtctagttgaggtatctctcacgtcaatgggtgtttatatctggccctcaatatcgtcaggctcgatcagttttcccgactaacccgttgatattcctttcaaatttactacctagcgcctgttgaaaataaaagtaaattctattcagaagctgacttgactgcgttgattgactatgtggtgaccgtaaaacccagtctatagccatctgtgtctgcatagtctataagagataccaaggcttgtcggaaacagtactatctagatccttgactttttcctgtggacaaaatggactccttaaacagctcgctagaccaggaaaagcaaggagaacagtagcctaatgaattgccgatccttagtgaaaaggactataatcaagagccttcagatcatgtccctccattggtaagtgaaaccattcggctttaaatgctttggctgactatcgtagacctccccttcgtaatacgaagaagtgataagatatgccttggcgaccgagccgtttcaacctatcttgaaggtgctagcagacctcgaacgtgacgatcccaagtttttattcccagcagcccgactcgttggattctatcgacgcctatgggagtcatgcgtttctaagcacattgatctccaaaagattgagcagagtaatgagatcttgaaggaggctggtatgtacctgagaaaagagagggacggacttcagctttaccacaataagtagctagcttgactgcgcttttttgagtatgcaatggaattgtctcgggaatgactgattaacctactcgatgactggaactacccctacagtcctaatttggccgggttcacggacgtcgtaagagaagagtaaggaattgcctattttgggttgccctgtcctatattagtaacatagaaatactacaagcggcgatgcagtgtaagggaaattacaccgtatacaaagtaggttatatattcccgaggcttttaacaagaagggtaccaaatagtcattatttattatcgtggtctttactgaaatgagtatacgaataatcccgcttgatttagattaatctcactcgtaattactcgatatattatgtacaaaaaaccgtgggtttagggatagcgtcgggggaagcctagttaacagagaatgtaccgagagactcgaatacggtagggattccgtacgaggctaaggggacagccggaagatagtgcctgttgcacggacagtatgccaggtgattgtgtctagcaactgtctgcgaaaccgacgaagatttcccagggctttttcaacccgcggcaggaagaacatatcctctcctatagtcttaccagacacccgctcaaatcgcacaaaccgaaattctatccagtgtacctctttagggaaaaggagcgctgatatctggaggaaaatgtcgctagcccgggtagagttggtcagaggatctggacctgtctacctgaacccggatagactgtcgagattgggatagaaaaggtattcgatcaaggaaggctcctgagttccgtattctgcagggtcgtctttgccaaaagaatcctgccacagatcattgggatcagtagcgagacagggaggcggtgtcggtatgccagaagattcatgccagatagcccgaaggtcgagatccaaatcgtagtctgtaatgttagcgcaaactcctatcaaagaaacgggtacagaccattctcgttcaatccattcatttctgctatatgactggccgtcgaacgctgtagggagaatatagaggtgtgtaaagcagcgatttaacgtgggttggaagggatggaaagctggagacggagcagtttttattcctctctattacgcagaatgaggacaaactagggaatctataaccacatgctaagttatcgaatgcgttgaatgtatcaacagcgtgcaccgttggccccgttcaccaacccaacgaaagttcactagcagtataggccttatctatccttagggacaacgcaaatagatagcagaaaatcccataccattctccctggctcgtaaacgctctaccacatggtgtctctatcaaggcccaggctcatcgacggactaggcttgaaaatcgctcgcttccaaagctgaaacaacaccattacaaagagcctgaaccgctcgcttgcgctcccacaatactgaagcttgttcattgcagagctgtagaaggatatcgctatcgcttgctagcaagtcatttgacgtttgaagctgtctctgctcctcctcgagtcgtattttctgggccgatttgacgacgtagcattcccataggcaaactacaagtcgagcaatttgagggctggtgtagcgagggagtcattgaggtttactacttttatgaactccgccgtaagggtacctcgtgttcttactggaagctattcagtattagtggttttttttaatttcccgcccaggggggtatgactgaccttggcttcgatccaagcctggcgttgaaggcgaacatctaggtctaccagtctttccatcggtcaaagtggtatggtatttggcgggactggcctttagccgagctaggtatgacttggcttcgcgcttcgttgacgcagaattcaaaaggcttagaaagaattcctaaattaaacaagcggttagcctatgacacagaaagaaaaaaattcatgtgccacttacccgatcgagcaggttcttctttgcgcggtggccgagacgatctcggttttcgctgctgcccgagaactcggcgatttgctgggttcggacattcagcgccgggcgcgccgcaattgggtcactaggacgaactagatgttgcttcaaattcttagtcagtaaatactcagcattagtggggtatatccggtttatttaccttcaccaacgaggatttggccgttcgagaccagttcagcgttcgagagctcatgattaagcgtatattttgcgaccaatactagtgcacatgagctcgaagcagagtagttttgacgtagagatcaaactcgcatactcggtaccttgtcatccaaggagccttgaggcaaaggagtgttgcacaagatacgcagaaatttgaatgatcagtgagttccttcaacgaggctcatctcgaaaaaccataaacctattggaaactagagagattacgatgttctaaagacgtagggtcgaggatctataaatattccacatagagtgatcatcatgacctcagtctattcgcttggaatacgctttataggagtgaagattgtactgcaaggtcccacaaagctcctgtccttggagtgttccgcatcgccgtggtcaaggatggacctgacgtcaaactcttcagaaaccccggggccttgacgaaattggccctgtggatcgccgaggccattcgagtccaagagaaagagcgtggtgactcagtcaagctcggtcagaagggagcagcaggaactcctctcgtccttgctggcctcgatgaagaccgccatctctatgtagtcgtcggcactggtggcggcggcggcgtcgttgacttcgctgccatcgccaagcgccaggaggagcgcaagaagaagaaagacgtcaaggagaagaaacagaaagagcgatcagagcgccggtcccagcgagcagcagagcgtgccgaacgggaagaagagattggtgcgaagacgaagaatcagaagagtccgagtcctcatcagaatcggagtccgaggacgaggaagatccgcgtggaagcatcttctccgcaaccgatttggtattgccttccaggaggtagtccaggagacgaatgcgcgtgtgcgcatcgacagtttcgagcattgtgttgtcaaggtccagaaggatgacctcggcgggttcctcgaagcattgagtttccgcagtgtggtgggctaaatcctctacaaacacaatcacgcagtctacgacttgtctttgtttacttcgcatgggatgtaaatgatatataggatgggatactggactctgaaaccggctacatgcataatgtccgttgcatgttctacgcttgcaagcattcaaatgcccttcattcttgcatctgtctccaatggggtttatggcgttgttgaaaacatgtctgattctatccagtccatagttgcatcgaatctatgcattttcggcctttccgagagcccgcatatccacttgttaaccttcatgacttcgtctgcttttagatagaacccagactaataggaaaaacaatccaattcctcgccatatcgcggcacgattacccggtcctccgcgagaacgtcctcaccaaccccccacccgcaaagtatcacaaggcgcaagatcaagccaaccggccaggggagatattttaataatacatgtataacaccatttaattttgacacatgcgattctcacatgttctctccccccattgaaagttgacactaatcccagtcctcaatccacgcacattgtgccaccacccaataggtatatagagacacccgccttcatgaagaacaatctccacataatccgcgtccatgaacccaggctgcatttcctcccattgctcatactcagcaggagaagactcaatagcagccagatccaccttggaagtatcggacttgtcaaccagtctacgagtcgttggctgaactccagatacaggatctggatctgccgtctcatcgatagacgtgacccattcctgttttcgagggtgaatctgagattcaggcgtgcgtggcgagtacagccggatatactcaatccatgtacagatgacttcggaggcaaaataaagtaaattcatatcctcaacgccataccacttcacgctcaagtattcattgaacatccattacggaaaggcattaaaatgctgctaccaaagcagcacctgcaacaccgacaaacatccctcctgacatataagtcggcatagaagccaatcccgttgatgttgacgtcgacgccgtcggtgtcggtttcgtatacggcacaatagacgtcgggaaatcccccacagcatccggaatctccggaccatctccaatctccacaatatcgtccggccccggattcccattcaaagcagccaccccaacaaaagcattattgtaattgatggccatatacatatggtccgagaaactggtgccaattgtacctgcgaaggtatcgtcctcctcgtcttctggttgtatgaggaagacacagcgttccccgtattgggaatcccatggacggaacagatcgctccagggtgcggagatcgtggcgtctccgaaaattagagaaacggtgtggttttccgttttgcgtgagcaggggagtaatccgaactgggggtcttctccttcccatccgacgaaggagatgttgtagtctttgtacatttgtagtactatatccttggggagggtcgttgtgatgtattgggtgctcagcttgtacggcttcggactcgatatggtgtaatttgttgggacgttcgagtctgtttgtacttggaatcgagagagagggagtaacacgagtccggtggttatgttaaagccgaatgcctgtaatgggccgtgatacttggctttgttgataccaccgaaaagtatacctgcgcctccgctttcggatatgttgccccatatgctgaatgagggggatcggattagatcctgattgatgagatgataagggaatgatgtgttttccggagatagacctatcgagttccctggattgtattagttttaagtctgaagtcatagaacgaaggtatatactaacatctttcataagtgacctttataagggataatccgacatccttcacttgggtccctcctatagtgataatgtcggtgcgtatggtgtctggagaagatgaccacttatgtttacttgggatttctttcgtgctgttgctggatgattcgctgatattgtatgatccaaatgaggtgcaaaggctattctcccggcattttgagttttcgtagtttgtgtcctcggtaatgacataaaactcgggagccaggaggtctaccaacatgcctatgggctgcggtggtgtaccaattgagacattgatgaaatatgctgtctgtatagatatattaaaattcaatcctaagcaaggatactccaggacgtacctcgttcaacacattggtcgccagagtggcagtgtctcttttctgtagcggcttaggtattttagagccatagagatccatgccgatgacagcaggtacgtcgcgcacaggaaatgtgtgggcactggcactggcccagttggaccataccaatagagctgtaatgagtgactggcgcattgtagagtgctaaatgttgataccaatatttcaatattgtttcttatactccgtacagaaaaggacataataaagggcagagtcagcagacaataaaccgccccaactccaaggcgttacttggcaaggcgtttcttagcttgaaaagtactatgtatggagtactttataagacattattgccttggcatttgttaacaccaattgcgagttgtgctttagccccggtggcggaaacagttccccgtgagtggacatgccaaggcagatggaaattacagggctagccctggcccccagggagttgatataacatgactaatattttaaaagggggctgtacaaaaacacatgctaaatcttgtgtattgactagataaaacatcttctcaaaggccttgaaagaagaatatatactctttatacaggtctttattgcgtactccactgagccctcggttattgtatcctgtcactataaataggcggagaagtacttaataatgatgaaaggtccaccattgccctagctggcccttgcacatgaatcctgaatgttgtcggcgtgggccgtattgtaatgtagggtccaatcaatggtgttcaactctctgtattgctgtatcgactttcctagcaatttatatgggccgtcgattactaatctaaaattacaaaacgcataggatcaatggatcctccggtatgccggtatgccaatgcatctactccgacagattagcagtatgtctccttaaaaaccaaagctgtaccctgcgaaaaaaaatgaataaaagttcatgccaaggctcatagtcattctgatatcatcacaccaaccattcaagcctcgacttgcaaagttccttagttccaaaggcttttcgccgattgaagtgggtcaatttggtcacaagccaccctgagtctaaagaactgcatcgacaaggtgattattggctgaccgcgaaattaagtgtgtggactgacgcgggggcctgttaccccacggagaaccaaacaactgagcctcagtctgtaaatcccccctaagcagcattaaaagctctgagtaacatttccctaagggagaatcattggctactgcttcatagcgatcattcccgtccttatatgtatagtcattgttacttcgaagctaaaagctccccgacgagttcgctgcgaatcctcccgctcagatttgattaacaggagccctagtactccggcctcctatcgaagaagccgaagaaagacactatcgagaacagatttggatgaaatacccatttacagaactggggacttccccggcagcagaaaacgtggcggtactcctgacgtggaaagaggcatcacctgccagcagactagcagctctccagacctcgctgatcaaaatctcacattatcgagactggatagctcggtaagtggatccaagattaagaatgagggcgccaattccggctacacccctttaccggctaagcctttactacaccacaacactggatgacggtaaggccacttccggccttctcctcgccatgccaaagactaccctggatgcaattttggcctcatgattaactatgacagggctaatattgtatctgggtaaatttaatgctcgccatttgaaaattaactaagaatacgatgccaaaattccaggtcccttgctatttcgacccgttgtcatagctctttcaaaaattcagacgcgagggagacccacacgttcctgggatcatatccgaccccagggtccacaacatggttcccaggcacgctctttcttggtcgctccaagggatcagactcgtatttcccagaggacctaagttacagccattgccccactcaagaacccattagcctttattttcggtatcctctttcttagaacaaagggaagatagagagggaggggacaagtcaaggtagggattaaccttttgtgaggtcacctgtgcgtcaaccttggcggtggtctgttttggtctaaatgctctccgaaagatgccaaaacagggatatttcaggcttggcattccactgatgtataagtttcatggtagttcccaatgaaagtcccggtatacggcaatccactagcaacatgtacaacggggagcagtacccgcggacgtatcgggtcttttccacgaaattgaattgatcgtcatgctactcggtaggttatccaggccctctgcgcccgccagggaaggtgagcgcggagacaatatagattagatacgtgtggagcaagacaaaccgaccccgatgctattcaaacctctctagagactcaaggtgtggttccgttgctctcggcgaattccagacgatgtgtcgagccagaggacgctactgcagacaggatccggccaagtgctgtgctcccggagtccttcgatggggtaacgagtcagccaaggactggtttccttggaatacccagagagaacacttcccgccgtggcagccgcgtcgtggatgccgccaatgtccggagttgtccctccattttatgcggacaaatcaataaaatgctagaaaagtcacgtgtgcattttttaaaagaccggtaatcaatgtaatttcttgacacaccactccatgtcatcgtgtccttttcgggaagtatccaccgaagcgtatctgccccagcaagagctggtttggtgagccatccaaatagggctcgactgcaactggcatcttatttgcaccctgcaaacattgaaaagcgccggcacctatctgatcaacaaaacctcgaaccacattcacggcctacttaatcatgacctttgccgggatcttcagaggtttctcctctaatggcatttattctcgttcttatatgtgttttagctggaagctaccgacattttttggctacagcagacatcgtgacagtatgtaattgagcctcgtttacttgactatagctgctaaagatgcttccagatacacctccctagtccgcccggtggcaatatgccccagctcctttctattcacgtcatgtctatctgtcgaggaagcaagaacgatatcaccggctgttcttttctcagagttcctgttcatttcctcccgatcccggtttcggcgaatatgcaaggcgttccatcggtcaaacatgagatcgcctggcctgaatatgttatggatcggttagctacattagctcaaacgagccgactaatgtcaattttttacctcattgcgaccggtgcctcggggctatctagtagttactggataagctcttttcggcgaggaaatttgagctggcatgtacacacggctccggcgcagactcttgccagtcatcctgacatgcctccatcattggtggaatttttaagccttgtagtaagtcaaaggccttgttgctataagggaagccactctgaccttcgtttcattgcagatgagtacgttctgtatgtgctttgcgtcgactattgcatcgatcatttcggaggaatttgtatatctgatcaacactgatggcaatccttacggggtttgggctagccatggcaattctttcttaaagttgtcttgggcagccacgactctccaatttttggtagttgttgaatcgttcatcttaatcctcaaacgcagaattggttgttttctgtgcgataagactagttcttcactagtggataaatgtggcaactgatcgccctcgatttacctctagcgatttgatgacgggccgcggtatacagtccacaatagccatatgttctcaataagctgacttcttattaagctcccaagtgcgcggtgtatattactgtttgctaatgaatggcctataatttccatgggcttatctcttctacaaagttgaatccttggcctccttttcggttttgccgtggagtttgggatgttaatcatcagccctgcgttgctgatcatgagcggtcacatagttcgtctcgttctcctctactcccatactctctcgcgggttatgtgaaatttctccaggctgggaatattgaagggttgtcttggcgtcaacaagtggcccaaggaggcgtcaataccaatgctctttagcgcagtcatatttgagtcttccatgtccaatctgaatggaccaaaacaactttcacgctctgatatacggcatcatgtgttatcttgacatacgttgcctcagaaataccccaatctaatactatgaacggttctaagctttcggtatgatagaaccaacagttgaatagagatttcgattggagtccttatgttctgaactgttcactccctggtgactacgctgactggataatcgaggactatggtttcctgtttgatgctttcccatcatataccctagtacagaatgttttgcgcggcatctgtgaagagcagcaagtcattatggaatggccacccggacaagtctgcttcgtgttccattttcacaactttgcctaggctgagaacaatgagcttgtacttttactaactatagaagaggaagaatggataaggtctatactggcttgggttataacaatggaagaagttggttgatgccattccaatgttatccggaatgctattctggtcacgcggggcctacatccaacggaatgccttttcgggtcccccttcccgagcagcctccttaagaatccggcggcagtttaattgcaaagtatctactgtcattacccgacacttgcaataacagtttgcagtcgcgtgtacttcaatgtaagtctcgtttctagcaatggacgcaataagtgccatagcccggtcatacgtagtatggcgggtggcctctatataacacccgcacctagtaaaccgagggaagtcatcctgctcggaagtcctacataacggaccagaaggcccatgtaaggtaaaaggcgagcagcattttctgtggccatttaatgcaatacagagagagcttgcgattatcttcaacgtagccggaggtcgctggttagatacatccgacattggctcctccgttcgggcttcatattctcctcggctgcttccccaatctcgcgcgacggctatttagtcttccaccatgcacgtcgcgacgttgacccattagagagataaagatcagccaaaattgactgaatgaagaacccctaccggaaaggataatctttacccggatacccaaacctacatagctatacgcggaaaggatcttgaattatgttgaatgtaactttaggtagacatagcaagccgctgtatgttgttcaccgctgcttggcgacttcctagcccccacccctcggggaccagctccatacttgtgcacttggcatagaacgctcccttgtgagctcgcgctttactctctcctccttctatgctttgaaagaacccagcgggcaaggggtgggtgagcgatcagggatgtctcttcctatttggcctttccactgatcgtgcagtttctcctgcttatcccaatgctcagggatcctttgctctgcgtggctgggtgagtttaaccagatctccctgcgtcaacaagacacctcgcaggataggtccgcgtgaacaaatatcctcgcaggcaagagctgtgcaaccaaggacttcagagcttccgtgactacgactgtcgctgccacgagcccagtgacgtaagacctgcgctccctcacagccaatgaggccctgtgcatgtaaaaacgcgctcatccatgcaagacttggctcgtcaaggacttgttatggctctccagcaacgtgcagtcacctatccgtggtgctgggggccagtattcgagtactcaaaagtattcgaaggaaagacctgtgcgacatctccgtcatctggttcatatttcgaattattgccattggatacataaagtgagccctagatagatattcacaaatgtcatcacccaaagtaagatccaaactggactttcttcgttagcaactgccgtattctcagcctctgccttgatattctgctacctggtaaagtccctttgccccggcgttatacggtacctgccagcaaattttagagcaaatttatactaagtattgatgtgtgtcaatgtcagtgttgtgatgagggttgtggtgaatgttcgggcaatgaaggaggtgctcaacgtctatcccacggggactgatagggacaccaaagttgaggtgtaactttggtgtccctatcagtccccctatcccaccctcagattatgtaagtttcctgaatagggggttcaacttgaacttctagaaatttatcgagcgatatccttccacagctctggaaggtacaggcatcaatattgtgggaccacaaaagagcagttcaagctctttgtaatggtgttggttcaaccttggaagcgagcgatcttcgagcccactctgtcgatgagcttgaaccttgataaagtctccatgcggtagagcgttcatgggcaggaagaatgacatttaatttccgctatctattgccttatctcctaaagattagcgatggccttggaggcgcatacaaccaatggtgaattttagttgggtttggtgacgggggtcaacagtgcacggctgttgatacatccaacgcattcgataatttagcatctggctataaatcccgcctggttgacctgattttgtgtaataaaacgggaataaaatcactgctcagccgccagctttccatccctcccaacccacgttaaatcgctgctttacacacttccacattctctttcatccctcccagcccacattaaatcgctgctttacacacttccatattctccctgttgtgatatgaggctggtacagatcaggaagcaagccgctccgtcggaattagctccgaagtgcctatacagacgaccaagttgatttccaatcaacttggctcattgttgtatatataggctcatgtatacctctgaaataacaagtcaattcatacctccgaactacaacactccctacagcgttcgacggccagtcatatagcagaaatgaacgaactgaacaacaatggtctgtacccgttgcctacgcgggcatgtactgcggaagaggaagataaaaagcctagtttatactttctaaaacttatataattatactctccctacatgatgacagatatcagctcaacaataatatcttctccagctgattacatgcaaaccacgcgttgaccctagacccttatacatttactttttcatcatgtcctgcaaacctgctgatctacaatgggtattgggccaagtattgggtgaacccttgcaccgtgagcggtgcatatgggtaggagatgacgggaatcattgtcaaaacactgtgccgcttgactccaggataattggagtattgtgctttgcgctgctccaggcccctccgttcgcgtatcaactagcgcagtaattttcgttggctgcatagcagttactttgctttgagtgcagacgccatcgctgtcggcggaaattgtgggccacccggattttgcagttgttggatggtcgccaagatcaatccaaagatgtctcgatgcactcaaaaccattcacggttaccaggttacagcatacgcctcttaccatagcaaactctacgtgtaatgacacttgaaatgcttgtgatacccattgcgaagccagttttatcaaagttgtagatatccgcatatagaataccatattactcaataacttgctggacggcggcgacccattgctgaattacaactggatctccacattgcgcctttgtggtctgattgacgcgagaaattattagggagctcggaatagcgctttacatagttcttcgcccaatacttgccggccatttgatagggtgttcaccgcgcgcgctacgcgagtatattaatcggccgtttctcgcgcaagagtggttggcaccaatttcacgatgatccatagaagttaataatctttatagcaaatcttttcactgattgtgttaattcatgatttgcgcgtgcagcaagacgattgatgggtttgtcctggaagccggcgctggagggtagtttcggaccaccaaatcgttctgcccttcctcgaatggcgggaatttcgggggctgttgtttatcattacattattatttttaatattattatttgtatgcttgtatagcacgtgggatcccctcttgacccggccaacgaggtctccaaatggtgcgttctggtggtagatgaattgtagtgaaaatgtgtggaggaacacgtggtcgcggatgggcgacccactcagttgtctgatccactccctgtccattacgttacaccttcagttgactctcggcaggcgggcgctggcgactattcagggtttatcgggtgacacgtctcttttgcatcatctccagtcacatcagtccatgttctaatccacagcctggtagttcaagatgatgtcacccctcagaatacccaatatatctcgaaataggcgtgatcagtgcaggaggcgggtcaaatgtgataagcaggatctcccgtgcttaaattgcatgtcgcccgaattagattgtacttacttgaagggtatggtatgcaatgctgcttcttcacgccctcaaagccatacagttcccatttcctactcgaagtctggctcctctccatggcagggtggtgtcaactcgccagagtcaaaacattcccgttctaggcaagtgaatgatatggaattgatccacaaatactctacggagacataccgaagcctttccgccaatgattcggagaattctatttagcaaatcactgttccatctctcgcacttcaatataaatatttaataaatggcatcctggccctggctttaatgtatatagccacgtcttcagagacctgcgaagcttcggtttatcttaacacgggcctcaagtactacgaccagagtttagcactatttcgggacgaactcaatgatataacgccacaaaattgcaacgccattttcgcaaattctatcgtcacggtcgccgtcaccgttacttcgtcactactgatggacacgaatagagaacactcaagcaaaacagataatgcagtgatcctcgttaggttgttgcagggtgtgaaaatggttcttcaaactagtcggccatagatcaatctagagctctttcctcataacgaatgctgggataatgccgtcgctaagctagacgtcgacacatctacagcacttgcacatttagccacattaaatgataagatcatgattagtatttttgctgagcaatatcgcaccaataagaaactcatctcccatctccggcattattatgccgaattcgcacgctctgctagacttagcccagtcctggcatagcttactgcagtggaagaagattttatgaaaagcctgagatatcgagagcctttttcgctactcattctcatatactggggcgtgcttttaggcgagttagacgagcaacgatagtaggctcgcgattcgggaagagccttagtatctgagttactagaagccttatcatctgataatccaagcctggagcatacattcacttagatccggcgcaagatgtcgctttaaggagtatcaatatttggggcttatattgatagttaattttttaggtcaggaatacattacagtatcgtctctgcaagttaaatgggccactccgcatatagattacagtaggagaattttcgaagagaaaggtataaagacccattacagagaacaatccctcataagaacgcgtagccatatacagtaatctacattagcaggagatgatcgagcgtcgaaagttaaatcaacttttcattagttcactgaatatacgattgttctcaggccagagggataatggtggatattccagcaggctcagcatgacttttcttagtctatgtacagctctttagtacgaagtctggactaatattctatgactaaaacggaccattccaccataccttccccaattgactggtcagcaaagagacagtgccgaagatctcttagtctataaataccgacacaatgttgcaaacctaccagaaaatttgcagatggcacgcacagtcatcgaactcgaggtctgccagaccctcttctagagaacgaaagcagaatatatgatacttgatggattctagtgctcatacccgatacgctcacggcaaagtctccgaaacccccatactacattgtataccctcgctaaattggccctcgagcttctcgattggtaatccttgtctatgggaatgctacatcctcaaagctgccaagagacgaggcgaggatgagcaccgacagctttaaaagttatataagcggctagcaagcgacagcgacatccttctgcagccctgtggtagtttgataattaggtactggtattttgggatcaagagcgagcagttcaggccgtttgtgacggtgtggtttcagcttttcaagcgagcgatattcaagcctacccattgatggaccttgctgaggtctcggctttattggacgtccgtgttagagcgatatttgatcaagtccgctatcgcgttctctcccaaatatcatcactgattagaggcccatgcaaccgccggtgaagtttgttcgatctggtgatgggatatcaacggttcacggattttgatacatgtacacccaacctttgattttagaggacttagcagccggctataatctttccttatttgtcctggtctttcgaggatgaataaaacccctactcgatggcgcgaatataaaggagcaagactcccaggagcacacagccctacaggtggccgcgagatgtggccaggaaacagccatagctgactttctgaacggggaagccaacgcgcatgccctaggccactcaccacagtatatttcaccgtcgatgatggggtgcccctacaagcgtgaggacataaagatgtattgtgatatgagacagggtgcagatcaaaaccaagccggactatcggacccaagttatctatacgaagaatcaagttgattgtgttgcgatatggggctggtgcagatcaagaaccaagccgcgccgtcggaattaatcccgagttatctatacgaagaatcaagttgatttccaatcaacttgaccttctcgttgtatatatagcctcatgtttccctctataatgatacctccataatgaaacaatcaattcatacctctgaactacaacaatattcaatccgcaatgacaggcccatagttcttgttctgattgctcctctcactttttacaacccctcgatatcggctgttttgcggtgttaaagcattcgtacggccagctggttgaattgaaaatgcgggttgggatgaattatgttgatgaacttgatttcctcgaagcgtaaccctcgcacgaattgagccttataaatcggagtctatcaaaaatagctaaatagcctcggacgacctggtttagtccctttttcacaggagatagtgatttcaaagcttgattttcagcctcgaaccctaaaaccccctccgagccggggtagccattgggacccaaaaacgccttcgaactatatccagctacaaaagcaagattcgccaactaaggaattgcttcgtacgagatcaagaagcccccgagcccgttgagtagcgcgataaaccaggttttaaagacctgccaaatcactatgcaatctacggctttgcttgagaaagaagtgagcgagttgcgcgccgcttgcgagaagcagaagcaaaagcgtacttgatcccagaggcagatacctgccgaagagggcctctcagttcaagaagcatctgcattgattatgcacccagaggaagcaattgaagcacctctctccggtcccggcatttacggagaatcgggtttacagccgcgtacaaaacccctcaagggcgtggaatctgtaggaagccaggaaatagaagagagacgtgtccaaatatataacgagtttacttcgttcaatttaacgccgttgtggttgagataaatgcatttcaatgggctggtggggttcgcagctcggccgggaaatacgttattagggtcggattgcaagatgaaacaaatcttgccccccagtcaattttcgtagccaaaaatgcctttttgatcctatcggttttgtgcaaggagtgccattggctgtgatgtgtgaaggtcaagcgatgaaactacgactggggtattgctatgtcacctttgccgattttcatttgaccttggggattgattgtcttcttgtggcaaataatcttcggatttagaggcttacatcaatttatcgtaggctagtaggctgagctagatctcttcaagtcccattgctgactccactctccaagggaccagtcctaagtctcatcattatgtatacctaaactcttgaatgggttatagaccgaccattttagtacattggcagtctccagcccagccaaaacctcttggcggaactgaagccatgggacttgaagaggtctacatagtatcgatactgtctcacgacgtacagtatgaaaaccagtgtagctcgttagtcagcaagcattgctaatcgactctgggaatcaacgggttaatcccggaaacgccaaaagcaattctagggctttttatttcctgggaacttctctctagctcctggggccactttctgtttctgtcaggatatacatgaagcatacggaacggatggagatatgatctacgcgggacccacatggtgtatatgggttcccctgaacgcgaggaagcctgttccttttgcttcctcgcgctacgtcttgtatagagtcaactatagttgttcttaatattgattattcaacttgaaacactatccacctctatgtatatgtgagaccctcacggtttctaggaactgaggtctacccctgggatcttcactctacattccttacggaatatgaactggctatgggaatacattggctggctcgtcgtgggcttcagatatcgatcaactatatagaggatagcgggcctctcccttctagagccgagaagagaggaaggtcttcagtgacaacacgaatgctcgctggccgagacgctcagattgacgcagagcagatctctggttatcctcccgtctggtgcgatgtgtaatatgtcatgcggtgtcctgggcctccatgtcgcaacgaaggacaatattgctggcaataagcaggggggaacaggcatcatagattaagaatacaccctcgtcaaatatgtggagcaaggtcgagttctcgcgacccacgaggacgttcctgatagtcttcgccagcagctctatgctgcggagaaccagcaaccggaccaaaaaaaaacgaaagctgcggataactctacaatgggttcaatgtgtcctccaatcagtatctatgtcctcccggcagtatcatcccaactatcactatcgatacgcacccctgctaatgatgacatgcccactaggcccgactgtactggatcaaccatggtagacggcctgctaggtgtcactgtggaggaatataccgaatggcaacaacggcggtgaacaacgagactttcagggagaacatcaagaaagcacgcgatgtaacccttgtaaattgtttcgacctcatgcagatttatgagggtcaaggccgaggctttttgtcaaacagggcgtgaaagtaggtgctacccggctgttggtgatgtatgtctacgacatgtgcgacctacagtactggggtatggagtaaggggccgagaggtttattctttcacctgctggtttgtgataatcctgggtttgcactgatcctcactctaccctatgaagaccttgttgtgaggtgtcattgtcatactttagttgtaggtagtgtgtggagttatgcctaaacgcttagatggttctaagtttcttaaaatacattgtagataaaggcattcctttattcagtcaaaactcatcattacgctctccatgcttctttctcttcggttgtgtcacgtattgctatgtacgtgtccgtggattatctcgcgtcggtggtctggatgtgctgggctagatacaccgcgattatgtgtagtagtgtggagtttcacaataagtccccacgaggaaccggtatatgttttagatactccgtttaagcgtcatgccccggtagtgttgtccaatgtaatatcctgtgcatgggaatcccggagggagagaggggccgtggagctggtacaaccatgacgttgtgtgggatgaagtgcagcatggccgtaagggcgcacggtgaagttgccggggttggtcggggtaataagcaatagggctggggtgtgttgtagaagtgctcaggattcgagacgagcgttgcagcacaggggttttcagggctgtgtccgaggaaaggtcgtttgggtgagacatagctgagaccggcaccaggattgaatcgcgaaggaggataacggccgtcgagcggatatcgttgttgctttggagctgaggcatcccccttctcgtgcactcatacttgaagcagcacaaatgcaagatacatagaaattcagatgccatgcatagatcaccaatctagaacgcggaggagccatactaaggacgcccttgctatgagtcttcctcccctgggccatgtttagaaaggaggtgaggatgggaaccgagcaaaccatataatatgtacagtgcggtggtggcagcatgcgattttaccattggctccttacctattttcatggtcaggaggctccaaatgaagcgtggaacgaaattcgccgtgccggcaattttgggacttgcttatatgttcgtatgctccgtttcccctttcatcctagagcttatgctgacaatgagcagagctagcgtggctgtcatagtccgtatcccatttttgcattacgcaggcagaccagacttcctttgtgagttgattcacatcgtccacatacgtcttttcgtctagtatagtagacgaaacaacacatatttcgatatggtcgaatgtagaacccagtttagggatcgctgccggtagcctaatgacgcttcgacctttgcttcgagttttatcaaaatcaggttcatcagtaacgaaccaacacagactcgttacttcttttccgatgctgagtagttgttctgatggtgaggaccttgaatcgccttgcgaataccaaacccactcttataattgcggtcattttgcaaattaatggagtcaacttcttggcttgcaatgtaggagatggaggggaaggtttgccacattcgtacagtaaaacaggtacactagcaccttcattaaccagctacttatggtgatctccctgttgtaacatattgaacaatgaaaatatttgcagtgataaatcgatttttgctggagctggggggttatctgcatggcctgggcatttccttgacgacggggcttgtcttatacttgtcccaaaattaaatagtatgtgtcactggttagcccttgggaaccagtaagacatgcatggagcactcggatggaggctagatataattgacctcggtggtttgatggtcacgctgatctggtttggatcatcaataaaacggtggggtaatatctaaaccgcccatagaaggcggttaccggtgcatcgatgaagatgtaacgagttaatattactttatcaattataaacaccgggcgaaagagccactgaccatgcggaaatcaagaaagccgcaaatataaacacaagaacggtttagattacgtgttcttcttgatcaggaattatcagacaaagtcagttatcattcacttttgaaaacttcgttagattacggtctttatcaattgcattactactctaaactatcaccgtccaaacccggacagaactgttacgggcagaatgcacaaaatagtttgccgaaagataggggataaataatgtcttgtcagaacttctctagccactttacacatctcaagttgggccttgacctattagttccacgcaatcactatagtgcgctcaactagttgctgtctacccctttgctaatcttttaaattgccatcaaacatcgttgttagatcggtggaggaaatgtgcagtgaaaataggaaatataatgaagaggcaacctcctgcaacatcatctactctatcagactaatggaagataaacaggtcgcgcttgtgtgtacatatgttgcattatattaagcaattcaatttattatacaccggcaacaagagcagttcgtttcgcagagaaagctatgatttcatatccgatcgaagatttggagcacgcaaagcggttcgaaccacatggccccggcggctgttgccctaagaaaaggctcaacgctcatttgaccacttgctcgatggattgagatatttttggcatctctcaaacactttctcttgggcgctttcttttgatcactttgtaccgaggcccatgttgaaaagcattatcgcgaggcgaaagacgcgaagggctatagctcatctcctgcttcggtcctatagagctaggctgaccgcgactgaaggattcatgatgaaagtcgccaccggatttacgaaatccatagtaataaagccgcctaacaagagattggtggcttttagtggacaacttttgaagtatatgcgtaggaaatctgctttccggggcaacgaagacagattgcccatcttctgaccaacgcattactgcctcattttttggatcatcaaggattctttcatatattagtacacagggtaacagtattgatgatccaatgaatgcttcacttactcgctcagatcctgaatgaagtcggatgcatgaagcctgggttctggccttgcatcgctctcagggcatgagtcagctcgttgcaagtcatccctcgcaatagcaacttctggtggagctgaatcattcagctcttcattgactggctgaactgaccggtcattgctagcattctggacagtcaaataggggcttgatgaatcttggtaaccggagctttcttgttctgtcgaggaaacaggaccaaaaccaccttgatttggaagagcggattgagcaccatccagcggtagagctcctctgttattgacgtggtccttgtttccagaaagctgagagactaagtcctgatgattccggagatgttgctcaacaagcgaaatttgttcctggactacattgatcggcttaagcttcctgtactgcaccacgggacaaaaatttcagagactcaccttcgcttattactctccgagcatcaacaagctcttgcaataccgtgtcgtttgattgaagttccttctggcaatcatctttatctggccaagggaagagaaaccgccaaggcctacccgagcgtaagagcctgaggtcattctctgataactcaacgctagaggttccgaccctaagctgtgctgggccctcaaactggggacctgcaaacagaacaacgctggtccaagtcaacggtggcccttcccttacggacggtattgtaatcgagaaaaggctctctagactcttgctgaggctgttgctagtcaaaacctctccgcggccaaaggcaatactgccaccttcatttaaaaccgacaaatgattggacaattcggtcgaaaattcggaaatggaggtatcggcaagcctaagaggtcttagacttttattatgatattgagagacaaagttgttaactattttatcaatagtttggcaagttctatcgccgggcacttcgttgaaaggagtggtcatcatttcagagcacaggtttgagcacaccctggactccaggaggcagaacagcagaacatcaatggcggtaaggtgcttgccgaggcgggttaaagttactccgtgttactaattgctagtcacagccactcgacgcacgtcccacatatagttacatactttgagcatttttttaaagccgccattctttagccaatttatttatttcggtttggtttctttctaatcttgttcgcctatcacataccacatttccacttttgagattcctacttgtacgcataatacgtatccattggttaccaattacaaagatatattcttgggcaaggaggatcgaatgagtcatgccagtttctacgacattgaattttacctcctagtaataacgtttcctgctgccaccattgtcgcgaaagacgagaaagttggaaataagaataagaaaagactgctacgtcgattttatggtgacggtgctggcaggaaaagatgattgtgagtacagtagtctgcctcaaattctttttgcacctgttgaataccaccgaaatacccgaaccactcaagagacaatattctataaatgtgtattttgactactagtattaatgatacgttctagccgtgttgtttatacaccataaactgccctcttagcgtcatcacgctttctcatgcccttgcttacaaaaagaatgcctattacatatgccgacttgaccgcaagatgtgtaccgtcaccaggtagttaatgaatcaaagctgttattgttgtctcatctttgtccaacggttatagaggagttagagagatatattaatacgcataggcgaagatcagtgataagggaatgcacggcgagtcgccactagccagccacctcacattgtaccgtttctgaccatctttggccacttagcgtctgctcagccagacactgttcccgaagctcttacctgctatccatttttaagggacatggccagctgcgccagacgaccacggccatcgtcaacatggaagtcacaggccccagcgcgcccggcctggaagatagtgattaactatagttcagcaacaggggcgtacctctccagctgaccgaacaaaatacccgcgcgacacatcatcacgaagtttggttaacctcaccctcagccaatcgttaatgaggcatgcaaatgatcatgagtgagcgcacggagtcaaaacgttcgaagaggcaggttcgacgagtgggtcacaaaagcttgcccttgatctccaggctgttccatttcccaggctattttatggcacgataagcagatccgttcgtagaatagagagcttcaccataggatcaagggagctatgggtatgatagagctctcgcatgcaaggctagaaactccaagcaaagtcacatcagcttggagcaattgaatctagactgtcaaccgtagttagaccatcccttctctctctaccgagatcagccccagccccgtccgcagcacacataccattatgcccaatctcgagggtgtctatgaatcgcccacccattcacttaaccagcagagtgcctgcagagtcattgccagcgctgatgagatattcgaaatgtttcggaccggctcttaagaagccgacacatagtcctgatcacatggccccgatcccagtcggcagtccttgccgtgcagcaaggtattagacaggcgatgtgagcctcgcagagcgcacgcaacaggcacagcagtccggaccctacacgtggaacctcaattaccaaatgtgtatactgcctgaccaagacttatctataccttgtatcctcatccacaatcacgggatgtgacgtaaactggacagaaccatactgaacttcgtatttgatagggtgatttgatgcaacgaacgacccgacagacgctgactgggccaccataccaccgtgtctactcgctggcatatatttaccacgcagaagaactgcctgtgtggcttaaacatcctccactaaattttcttcaagcccatccagcttgtgtggattctataccgcggtcgcccatatggcactggcttgctaaatcacttaatgtctatctttacgaaagccaatatactcctttcagatgcggcctatctgtgaattggccatatgaagccctcgactatatactgtcagacgaggactcagccggaaaatcaaacgacgtactcgtaaaatctgccctttgcatataaagaatatctctaactggtcactaattccgttatttgcggagagctagtcgtggctgatagatgtcgcacgacaatcaatagtaggtgacttactggcccaattacattgttgacatggtcgtagcccagctgttggggtattgccgtttaatctacctatattctttgtccgagtgtctggacctcgctgaacttggtctccgtgaaacctaatatggcattgcgattatcaaacaacgtgaatatctttgatcttggcgaacgttttccgtattggctctgctcatctgaacgtggttcatgtcgaatcggtttgtagaaaatcggatggagggctacaaggttgtggttgggggatttgtaggtcagttagcacgaaaaagaacagccctagagagaacaaatttcaactgtattcaaaagtctatcccgttgcttctcgtgcttgatagcaggaaagttgacaattcagcgccatcgtacatctcgatcgccaggatcaattttgaccagagtaatctagtggccatccctccggcgttagctgcccacagaattcagggttatagacagatgctgtcttatccagggtagccacatagcgattgcggcccttgcgtttcccatacgttgcatagtgtgctttaaggttgtcgcgacgcaagaagctgcgttaacacccaggtacctagcagaaatgaggcctctcccctgaatggctttccaggtgacgattaagggtctttcgaagtttgaaataactcctgtatccctgaatgccgcatttgaactgccgtcgagtgacgttggtctgggaacctccgaggctcaaattggacggatcctacgaggtatatagaagattgacaggctgcccgaaggcttagcggggttcagcaacatcattttggctatcgtgctatagtgcctcgagtggccgtgggtagggagaattgatattcgcttggtttgggaaaaggcaagttccaaagaaactcggcacatagtcaaaattctcaggaggtggccctagcaggaggtggttagatagcactgacgtaggcagatattcgagctaacagatcataggccgtgatccgcaatagatcgaacctagatcaatcgagcagcctggttgcccgtaatagtggctatcacagctgccttcgtgcttttgcactaagtggggcgacgcctgataaataactaggcccccatggttttaatgaaattccataccaggccactcggtagggctaggagcaatgtttgctttcaatttggcgctattatagaagagcgtttgtatgccatttgagaatgccagattatttctaccatatatttgcgaggatagtggtgtgatttgttgttctatctgtagacttctacccgtaaataacatatttgcagacatcttttgcagatagccgaaggaagtaataagcggtaaagtccgacacagcactatagatatattgtccagatgccacgcttaatctgtctgggtgcaagtatgggatgccgggtagaagtttttaaaaagttatgactagctaggagaaagtcgactcagtagtagcaacccttatgacctttggaatttccatagtatcaagcttttattcgagaggcgaaaagagtggccgagtaaattttcaccatcacacggatagcgttaaataacggagacttgctattttgcgttaggttacgccttgaatagatttgttacaatgatagggagttgacagataaaaagcccgctgattgaacggtggtcaaatacgtgcgaggtttactttaatacatagtgttgttaccgaccacaacctcaaacaaggcgtgataaatatgaacgccagggcctaacatttatacggactctcaacaaccttaatgaccatttcttcaactcccgtataccaaacctggctacccaaggataggtgatttaacacaacagttattagcaaaatggagataggggcgtccaacagctcgccaaagtctaagttaattggaaatcaacttagttctttgtatagactcctcaggatttattccgatggtgcggcttggttcctggcctgtaccagcctcatatcacaacactttccactgcgcacgtactccatgatagatatacccagaaagcacaataatacattcctcaaaaaggctgactggtgagaccacagtgaacctgaatggtagtccttgactgcccaagattgaggttaatatagcagacttcacggtgggaaatgaacgaggtgtccgataaagagtcctagtggtagttaatcactgcctcagttcgtcaagtaatcctattaagaagaccacgcatacagtttcccatcgtttaaacattcactttagtagaataacatacgttgctgcatcgattacgatcgactaaatcaaacaaatctaccatcctgagcctaagcctatacattgacagaaattttctttcctaggccatcagagcactagcctctgcttttggtaatatcttaaaatcgtgtaaacattgtgaaaaattcgagagattggttgctcaccttctttttacgaattttcgagccctattcaaagccagcacgtcttagtgtatagcctcaaatctcatagtatcggtgctaatagaactgcggcacaggctgcttggcatttcccgaaagccaagttgcatgccattacggaggcaggtgcactagcacccatagtagctccccaggtaaagcctactgccgagtagcaagccataataacagcggcacatcctacttggcaaaccccgtaggcggctggtccggcagatacaggagggatgaaaagtaggagattattaataagcacccacgggactctcattttttaggacctaaaagaagttgaaactaggaaccccaaagtatttgtgctgtaccaagagtatgctaagacaagggagaccatactgcctaaatagatagacattcaatgatacgtcgccaaacggtggctactctctaggcctcatgaaattttgcgttccgccgtttcctagaaaaaaaggcaaacggaatccttacgtttagaaatgcagacatacctcggatgtatcaaatgcaaggcgtacgcaagggatcaacacaccaattacattgccattttccacatgcagagagccgatttgtagtcagcatttcctgtcaccgaccgataggccatgaatgagtgagccaacgataccccggacttaaaaccagttatccacctcacagatccccacccaaagctcacgaaattctctcgatgtgggccgaatcagtattcgttcaatcccagaaccgaaaacataagtgatcatcctcgagagcagatatgcaagaacgacaagtctgtctgagtcacgaggaaatcgttcgacagagaccgtagaatcacgagcgcaaccgtctcggctggcctgatcgcccgcctgcatcagtttgcatcagtttggcctgttcatggcaaatattgaaacgcactggtgagaatacctgcacaaagtgaggcatgttatgacctctccttcaactaatttcatgctgagcgaaaattcgcttcagattctggtaaaccaaagagaaatactattcacggccgtactaggataggggtgtcaagttcatggaaacaccgtcgttgaaggaacgttgattgacagggaaatcttgcgcatatatatcgggcctcagcaagaactactctgtcaaaaaaagagcctagggcttcaagtatttcaatccgggtttttcactatccaccgttgaccctcatttaaaaaaaaaaaaaaaaaaaggggagactacctgtagttaacgaaggtgatcatcgaagtgattggcattctccgttagctgccagcgccttcatgttactccccactgacggcgagcctggaagtccaagcacgtcccataattttgagttgcgggtcgagaatctggatcaacgtgcctctgcttgtgcgagatggaccctctcacctctggccggcgataaaaaacgtaaagctactcgctctacgctgagttggccagaataattcctgtaaatacatctgatgttctactaggccggctacctgtttcgtaagcgtataaagggatatactaaacttcaaaaagtaactttctgcgtcgatcagctagtactacagctgcaaatctatttttaaaccattccgagacgcgcttaggcttaggccacgaaaagaaggtcaaagcttaccaagtccatacgcgcctattcctccgttgatcgaacgtaggcatgtatgaacacagtaaaacagcccatgttataaggctatagaagatgaatgctctagcatataaagtggcataatcgcgtcttatttgcaaattcgatcgacgtgaagcgttcgatagctaccgtgactattaataatcaagagactcttcaattcaatatcaaaccaaatgatcctggtgatatatgatttgactgtcgaacatttgcgtgatccttggttgtgatgaattgcattatagaaggtacattggggctaacggaaggactggccacgtggacgtttataggggaacttgccatatctggcaactgaggggtatactcagagattattccgggatcttcttcgctaagactgttttctgttggctgctagacgcgttcggctgacttagtctgctcggtcagagatggtttgtctaatggaaaacggactttcagtaccagcggatcgcgcttggctggctgggctggctgggctggttttttcttagcttgcgtctaatagagagaccaaggcagcgagcctgaccagaaataaatgaaggacttcgtcccctgtggaatatctcctcgtattcttgcgctatccgcgaccaactcaagtgccccctggtactcaagaaagcgcgcaattgtctcttttctaaagggctccacgctgaagtcatctttaagggcggtatgtgactctcctctccggatgtgcttagcgccgcaagagtactgcccgtctccccatcccgacaatggtcggggtttggttctacatcaattctagttttagtataaactgcagaatctgtgtttacatccacatcacatatatggatttcgacgggggactccgaagattctgatctggtaaaatctctatcggcgctatgggtctgttcttacgaaatttggaggattgtctataccgtctcgttaactagtagactttagcctatagacccccccctttttttttgacaggggctatgtatcaccctcactttctgaaatgtcctctcgcaggcgagtcttaaatctttgatcaactcagttctagcttctcgctctgcttgcacatcttcgggttcaggaggcatcaggagcagcttctgtagcaagttggatgaaagtatatcacaatcgcttttgctcaagtctaataacaggccccgaatgcaaagtcgatactggtcctcgtcacgtagctcaatttgattattcaaattcgattctcagatgagatcaacccagctgagatgacctccgcgaaggctgtcgtcactagccaattccacgacccttgggcgagagctactgaataaaccgtttatcctgtcctctattttgttactaaagagaggcttgtagagctgcttggcgacactgccgtttcgatcaaggattccgatgtacagtctcatcagcttcagaattggctgtaaaccatggcgcaccgtctcaatccgcggcagcggactagatacccgatggccgaaaaagtcaatgggctcagtgggcatattactcataggacttgggattatactggcgttttgatggaccggttctaccgaagagaggagagcgacctttattcaatccattgccagagaccggatccctgccgacacaagagtagagaggactaattgaaaagaattactcgaaaccctcagtggtaatggaaaagggggaagggttgccgtcacacaaccaaaaccgcttagtaaacctgggtactttgttattaatgccccgctagaggagcatgattcgctgaggctcttgtttaataagagtgtggcatccgattggttgtgctagccaacacgatggattaaatcgaccagtgatcggagggctagaagcgccgttacgacactaggagcgggcggcggaaatatcgagcagaaaattctttattagtaaccgaacacagtcaagagatctcgacggatccacacatttggcccttttccgccttactttttcgtaaatgtcatatggcttaacctaccagtttcatacaaagctttaagtgaaggtttaccaaagagatctggacgagcaaaaaatgaagattgtagtagatttctatgtataattcatattgatctgttgtttatggcccgggccagggatcgggcacggtccgcgcgcggtggaaacccccggaatgtttacccctgatattaggaccttcccctcttttgtgtcccatcgtacacttcttgggctagggatgtgatgatagcaattcagcacaaattgcaaagtattgctgagtgacctgaatgaccaaataatgattccggtgcgcagaccaagaatgtaaggcgttttaaggagactttgaacgagcatgaggtctagtgaggggggcagctcttggttcaccaatctccatagtgtgacaaaccatccatggttccaaagtgggtttagagaccaacaaggaagggagatggtctagttaatcctcgccgtcttaggcgctgttggtgatcaaaacggtcgaaagctgccgagcgatcatatttaggctcggtaccaaaatttcaggaatcgtagaaacttagccaatcggaattgagaagctcctctaacatgcggacccgatatagtgtcataacgcaaggaagtaataccgcgaaaatgtatcaaacattgactaggattatcgagcgccgtccgctgccatgttacatttcaaaaaattgatttgcaaaactgcatcaaccttcgcttggtgatccgaccggaggagttgggggcatcattgctgatcgacgggaaactagccatcaatgaggtgggagtgattgaggctgtctgcttttctctccatcgatttgacgcaataaacgggatgtagtgggttcggagtatcattattcccttgttaggcgatctaacgctagaagatgcagatatcaacgcacaagcccgcaatatggatgggagattttgtcaagatgcaggatgatattatcttttttaccatgtaaacatgtgattttttactatgcatttgcttactaatagtgtctgaccagattgttaaattcaaaccattgttgcttttagttagagaattgtaccgttgtggattttacccgtacgttcgccatacacctgatttctgttggatttccatttaccgacccttgacggaggtggaagcaagaaccacgtttgtaaatgtggaggcctaataggctgccgctgcgacagggagtaagaagggtcaagaataccagttgttcctagatagttccatgtacgctcttgcaaactcagtagaacttgattcagatatgtcagtcatctgctcctaatgttgaagggttgtcttggtaaaaagaacccttgaaaagaggaggccgaaaatgctaggacatgaaatatgacaggttacttagagaagaatgatgttattgtaatttacagtgaatgtttgaatatgacacatagctgactcttgctcgcgggaaatgttcaacgggtgtgtaaccactttgggagcgcctcaggagtttggcatcttcgatcccatttaacgcgtatgttattgtttgccgatcaaaaccaaaccaaccgaccctattagatgtcatttagagacacaactacgcttccacaaatcattttatggcatcgccgaacgaccacgagagtcatttcgttagcaaacctcgcagaaatcaggcgtttgtctgttctggttgaaaaaaaaggatgccctgccagttcgcctgccgcttttctgaatctggataccagacaagcattctcttggcgagatccagaaacccttccttctcctctccctcaatgaagggagcacgtgtcgcgtagtttccggtcggggatcagatcttcgcaaagggttgacccagaatggttcgttagtctgggaatacttggatagaaaaacgcaggcttcggaaccaaaccaaacaaccttccgtccaaatgggtcaagaacaaaatttattgatagcatacagctccgtgagtgtccaaatgatttgttcccgctcgcttgttcatgtcgacagctcagcaacgcggagaggaagaggcatcaaggactctatcagatgtggttattgggtcttactacgctccttgaattttgagtcttgcattagtcaggcataccaacgtctgatctgatgaaccaaatcgactggagactggaagaaagggtcgagtcagccgacgtggtacccactagcgactcatcgaagcgaattgtagtcatgtggaatatagagagcatgcgaccgttagttgttggggggtgggggttgagaagacaagacatttgctcgcttcgcattctaggcacggaaatctgagggtgtcttcctgtggtgagatccgagttagcaagcgttggtccagctgtccgagatattggatttacgatgaagcatttcccgagtgtacggttggatcatcataataccagcttaccaactagatcattgccaatttgattctgcaaagcagtcaccattcatgtcatgttgcatccaggttcgccgcacttctcccactgtcgcttcgagaagccgtgctggatgcactggtcaagttcacaagacggcaaaggcgcgcgacgaacctacttgtgacaagaaactgtccagtctgattgggagaccgcttcgtgtggacagtgaggggctccgctgttcagtgtgtgaagatggtgagggaggggaaagacgcgatggcccgtcggccccttggtgttgtagttcagaggtatgatgattataatttcagagggaacatgaagctatatatacaacgagaagatcaagttgattttcagtcaacttgattcttcgtatagataattcgggattaattccgatggtgcggcttggttcctcatctgcaccagcctcatatcacaacacttggtcttgcctgactcggcaggaataggtcactcgcgacaggtgttttcgcgattggcggtgggctgctcctacaatggcgtagagatgtcagtgatgtttgtgtccggggcacagacttcgcagaaaatcaaaaccggcgcagcaggaggcgcgatattcccctcacctcatcgtggagaacgaacgtctggagcttatgcgtcctgtttttggccagcgaccttggtttgcagtatctcacataggacatgctgcatagtttgaagtgacagggtaagaatcggtgtgttaaccatgatcctgcgcggagcactaacggagtgccggttcggcctcactttggtgcgctgtcaacgatttccagtccatcgtcagcttgtcgatcgacgataaatgcatgattcacaagttctgaaaaggcgcgggaaagggctccatgactggtgtgtattggacagaattcacagacctggtggcttcgcatcgtctttgcagtcagtctagtcgcggaaagggtccagacaacttttgaacttatgaatagtgttgagatagataccttgttgttgcacttttattgttttccgtgctgtaaattttacaacatctacttttgggatttcttggcttttcaacgaatgtggaaaaagtgttgtgattgggatattatatcctttggacctttcaccagtaagccagtaaaaatgaggcacattcaccaaccggcagatgtatatacatactatagtggaaatacttaaattcggccggttccatgggctcacaggagttgttgctgtcctagcaaaagaacaagaatggtttgctatattcaagtgtatggcagacagcatggaattactacggaaactgcataccaacatattcaacttctagagcaggctatcaatcacaaatttgaggaaagtgctcattggcacgggaaatgctatcaccaggatcgcgtacgaccccacccatcctggctccgaagggatcttgtctatgcatgtgcaggggagaaggggaacaaccgcctgaacgaggtgtggtacaacacatggattttccgcatcaatctcaagattgacggcgatttggatgaacggaccgcacgcacgctgctagggttacacatgaaggtggagaggatccagtttacagaaaggagtcccaatgaaactacgaagcgtatgcgtgaattgagagacgagatcccatggttggcggatgggtcggtagagatgagaaacacgggggattgtcgattcttcggaaggcaatttgagattggaagggatatctgatggacgaaaacaggaaaggcggaaggaaatgctacacgtccgggaaaaatgattgttcatcacgtcacaatgttggatcccatgccacgtgatgtatatagatttataggagcgtctgcccaacaggcagacactccgctaggcagcagggagatgagctgctgcaattgcaaatagctgtatcctgtattcttctatttttctactaataacctcaattcacggcctcaactcaacgagcggtcaggtgaattgcacacacacagtaagaaatagatacataaaatatatactaaagagcgaaactttccatcaaggttagaaaaatatcaactaagcaatgcgcatgcaattgggtgacgatgtcagcgaaggtgctgtgcgcacgtatcacctatgcgagtccctcctgcctgcttttgacaacttccttcttcttcttgtagttcgcgtcgttgccattgataatccttttcccctccaagtcatccagaagatcaaggacgtagtcttgacagttataccccgggtattcgttgtggatcggcgcctgtctcgctgcctctttgattgaggtaaccttggcaataggcacatcgcacaggtaaatcagctcggaaagtgttgctgatttacgggcatcggaagctctcatttcgaagcggtaattggtcgacgaacccatgatgtggaggactgtctgttccgcatccgtgggtccgttaacaaagaggctccagtgtttgtagacacctccgtcattgtagatagcgacatggattcctgcagtcgaagacatttgtaaagtgtagacggctaccgtaagaactttgggacgtggtggatgggtcttcgagcgtaagaattgtaggatacggtaccgactgttggagagcaacagaaaatgcagcaacagtaaaagcacagaaccgggaggcaaggctgtatttggtaaaagtaagaaaaggccttggctaagagcgatccggtgccctgttcagacttaattgaaggagacggaatgaaatggttctgagattagggagaacgatggttgtacttatagaatacactgaagattagatactactatacatttgaaaattcacgataccgcttggcaaatgtcaagcagagcaactagccatccatacatgtatcatgttagaacactgtcgtccaatcaattagcgctaaggtgtctgtaagtgataccaatgtgcatgagataggcatcgaattctaaatttaggtcgaaggaagggtttcctagctgctgaaaccaaagagcgtcacgctattttcataaccatgtaagcgctcgccatgtgtgacttgaacgcactgacctgttcgtaaatagggacggattggcatctcacagcgaatcacaccaaactcgagagggacctgcattgattagcgccggcctcgacctccatcccaccaatacaagattcccattccctccgaccaccatagcgcctaaagctgcttatctattggaagtttcaaaaatgcggaattagatggataaataggggttagacaattctagctaataaaattgatctctagcagctggaatctaccttgcccaaggtttaagctatgtggaccggacgtggatcccccaaagtcggtcaacaagccaacgtatagaatatttagaaggcgagatgctctctggtaagtagagaaaccagtcgtcttcatccactagactcagggtgcgcgttagggtagtacactcatagtacgccggataaaagccgctgtcctcccaatcaatgatcccagtgacaatataatgaccattgatattccggtcctttgtcaccatgatattgtcaaccctaacatcaccatgggtgaacaccaatctatgtgccatatcaggactatcatggtgtaggagggatcgaaggagtgtgacgtatgtgttgctgccatggtgacgggccgaaaattgcaggttgctaaactccatggctgtagtgatacctttgaataaggcacattcgtcaacgcgaagctctttagccccttctccgcgaaccccgccgagcgcctttccctcgtcctgttgaagagacctcaatcgacagaaaatgtcttctagctgttgttggatcgataactttccctcatgtgacagaacaggccatgcttgagccagcgttgtgcccggaatataggacatgaaaataacccgaaaaggaccgaacgcgatcaagccgtagggtctcggagcaggtatatcgggcgcccgctcagcaaggaattccatgctcgtgtattcggtgtaatccctattccccaagatgactttggcaacaatgtcgtcgttgcacttaacaacaacgcctctaacagggttttcccacaacttgggcgaattccaaagaagttgtttcaaaggcacaaccaatgctttcccattgtcacttgacccgacttctaaagcatattctgaaaattgcgccagcagagcgaccacctccttagacaatggaaagatgaccgtggcagtctcggcaagatcaagccgtgtgcggaactcgggggcttgtacctcgggagcatctttctcgaccagtggcaataccttcggtccagtcgccatagtaatctttcgattataatttgtcgggaatttggacagcacgttgacctcgggttcgtccctgagtgtatcacggagctcatgcaaggttcggagattgatttccgcaggataagatagctgacgatattgggaattccgatgttcaagacgatatgagtcggagaacattgacatcaggtcagcctctggattcctttccagttctgcctgaaatgcaaggataagatctctgttccattgtgctgcgtccgcgttggagagggaaagagcttctgggtgaggagtatcacccatagttggtgtcgttgattgagacaagccagtaagcctaaagatattctcttgaataacttgagtgtggccaagagaggcgagctctagggacagatagggtggagccccgtgaaggtgggactcgcctaggctgcaataagctgatggcgcgcaggcgtgcttcacgtgaccattattgtcttacccaccccacacgtaggctaagctcctgggagtgaagagtgggtttaccaggaacttgcaactctttaacgtatcgaggaaagatgccaggaagagcgcggaatagatatataccgaagtattggtctacctgtgagtgttgtcgagttacagataatcaagcaaagactcagtaatacaaaacgcaaacacaagtaaacaatgtatgactgaggacggagaactaaactaggtacatgaacgcgtattcttatatatccctgagttcaccccttgtgatgagtagatagtagagtggtaaaatctccttggcagattctactgttcgaccatctacccttctacaacctgtaaggtcacgtggtcatgtagctccctaaaggggtaaccttagatgaaggtgacatccggtacagtgaagtacatatggctataaattcccctagcttgccctcattctgtgtaataagagatgaataaataactgctcggcatccagcttttcatccctcccagcccacattaaatcgctgctttacacacttccatattctccctgttgtgatatgaggctggtacagatcaggaagcaagccgctccgtcggaattagctccgaagtgcctatacagacgaccaagttgatttccaatcaacttggctcattgttgtatatataggctcatgtatacctctgaaataacaagtcaattcatacctccgaactacaacactccctacagcgttcgacggccagtcatatagcagaaatgaacgaactgaacaacaatggtctgtacccgttgccttgataatttcttgcgctaacattactagtctacgatttggatctcgtccttcacgctatctggcatgaatcttctggcataccgacaccgcctccctgtctcgctactgatcccaatgatctgtggcaggattcttttggcaaaggcgaccctgcagaatacgaaactcaagagccttccttgatcgaatgccttttctatcccagtctcgacagtctgtccgggttcaagtggacaggtccggatcctctgactaactctactcgggctagtgaggttttcctccacatgtcagcgctccttttccctaaagaggtgcaatggatagaatttcgatttgtgcgatttgtgcgggtgtctggtgagactataggagaggatatgttcttcctgccgcgggttgaaacagccctgggaaatctgcgtcggtctcgcagacagttgctagacacaatcgcctggcatactatccgtataacaggcactagctttcgactatccctttggcctcgtacggaatccctaccgtattcgagtctctcgacacattccctgttgactaggcttcccccgacgctacccctagacccacggtttttgtatataatatatcgagtaattaagggtgaggttaatctgaatcgagcgggattgttcgtatactcattttagtaaagactacgataatgaaaaatgactatttggtgcccttcttattaaaagtctcgggaatatataacctgctttgcatatggtgtaattccccttacactgtatcgccgcttgtagtatttcaaagttgctaatataggatagggtaagccgaaataggcaattccttactcttctcttgcgacgtccgtcaaccctaccaaattgggactgtaggggtagttccagtcatcgagtaggctagtcagtcgttcccgagatgattccagtacctacttaaaaaagcgcagtcgagctagctgcttgtcgtagcgaagctgaagtccgtccctctcttttcttatatacgtaccagcctcctttaagatcttattactctactcaatcttttggacatcgatgtgcttggaaacgtatgacttctataggcgtcgatagaatccgacgagacgggctgctgggaatgtaaacttgggatcgtcacgttcgaggtctgctagtacctttaagatgggttgaaaaggctcggtcgctaaagaatgtcttgttacttcttcgtattgcgaagtcgaggtctacgatggtcagccaaagaatttgaagccgaagggtttcacttaccaatggaaggacatgatcagaaggttccagattactgtccttattactaaggtttggtaattcatagggccgctgttctcctttttcctggtctggcgagctgttcgaggcatccattttgtccgcaggagaaagtcaaggtctgggcgatactagttccatcaggccttggtgtctcttatagaatatgcagccgcaggtaactatgtactgggttttacgatcaccatatagtcaattaacgcagttagcttttggatggaatctgtttttatttctagcgggcggttggcagtcaatttgatagaagtgatagtaatcaacgaatcggtcggggaaactgatcaagtatcacgatgttgagggccagatatgaaccctcattgagatatatatttcaatcagacacctcttccacttgcgttgaaagtcttagggactcggcaaacagcattgtagaccttagagtcaccaaaaaaagaagttcggaaagaaaagggaaaagaaaagaaaagaaaagaaaagtatcttcgaagattggtcacaaattcaaaaattgagtgttgacaacgtttggccaagcttcaacgggttgatgggttgagcaaccgcacatcctaccgtgacctcgctttctgcagtctagtctaggcggacagacctacagctcaacacaaaccaatactaaagcgaggcaagaaacaaaggtccatgattcctagggatggaattgtaggagcttttcggtgatccaacgttgagtcgctcatagatgcgctgatcaaaagcaagagatatgagcatgtcattgtcgattatatttctcccacaagcctcaattaagagggccgtgaaggattcaacagtcaaccaacgttgcttgaccaactcagcatccctttctctcagcaccactcttactcgcctctcgctgggcatctaaaggcattaagaatgtcgctgcaaatagttgcggtaaaagaagacgtgggtttcaacaggcctcgattaagaaatgtgtccttcaacacttccaaccaggtcggtgagtgacagaagccgaaaagcctataaatacgtcctccacccctgcaattgctctactatttattcacttgattctgcaaagtcgagcaggcttgtttctgacgcactcgataagttctcccctttgatcgagtactggaatttataccgtactgacatttatagtatacattgtggaccagtaaaccagacagttcctgtactttaagagacgtggttccaagcagattcactgcccatttacgccagccgatcggagatacgagatttggattagctagtcaaggcgtctatgcgaagacgtctctgctatagctgatctgctatcgcggctctggttgaccacaaatttgaagtgcaactgctcacactgtaggtatatgggcccacaaatccttgaaactgcactgacccgaaagacgcgggacagccaggtccgtagaggttcgaacacaatgcaccagggcaagggccacagcttcttgtggtctcttcatccctggtgttgaccatcagaacatgtgagttatgggcttccacgctgatctactggctaataattgacagtgaacctttgagagctcaccagagtggccctgataaccttgcactaccgtcagtgctccacgcaaagccatggcttacacactattcctagccccgtcgcttcgaacaatgcagcacgtcctaggtggaagatcgcaaaccaagatagcgagtcaataacagggtgcggccatccacgtgcgaacttcgttgtatagaaccttgagactcccattcccatgctaaggtgagtgagatctaacgcttacagctgcgctgtctaattatccgcgccaagtcttattcccctaaccacgaactccactaacatcttcacgctattgtaggggcatcctatcatcgacggtgaaatatactgtggcgagtggcctattccgccagatcgaggataagaccgaggtggcgaccgacgagggtgctctatcgcgtcttccgccctcgtccctaccgccttcgcactattgtggagtcctgaacctctggcatcgcgacacattcatccaccatggaagtgcaatatttatcgcaagcgggttcgtaacgcgcgtttactatctcaacaaattgtcttgtgcaccccagcgcggcttttttaaagcgagtgcagattgcgataagcttgaatgcgacgtggtatggctggtaactgcattgcagagagttgtaagtgatctagttgtgaagccgatatgaccattgtgcaaactgatcgtcacgtctcaagcgcactttaggattcccataaacaggtacgctacgacagctcgtctaagatcaatccttgctgactcggatcgtacaacaggaggacaccctcatttctatcactcgagtcgaatgccacgcgaacaaatgtcttgtctgctcgagctcccctatacaaatactgtcgcatgctctctgtcccttccgcatgactactatcgacgatgagtcaccagaatattcgtatcgcgtacctcggcctctttctccctagattctgtgtatcaggtcattgttcgatttgtctacatgatacaactcctgaactccgaccagcctataccactacccgaatcatacctgtggctaagcatgcaacctttcaaataccttcaagtggcgtaggctgctggtatcgaatgcgtgatcctcgttgtctgcggatgacatttgatgtctttccagaagtggaaaaaggcgcaggaatgctgatgttttgtcttgcttcctggcagatgagcgtacctctgcagacaatcaggctgttagcacaagtccacctgcaaggggaaggagacggaaagtcttctcattcttagcctacaatttgacattggtcaaaccgagagggtaagatcggggcacaggcaagccaatgagagctcactacccaagaatcacctcgggcatacaggaacctgcatcatgagggctgtcaaaagtgttgtggtgtacccggttggttcttatgcacgcgtttcaagccgaagcactatttgcaaagaccatttaccctgggtctcacttcagctgcaggttagtcaagtcgaccgcgcgtatcttttatccgttcatatcgtctcctaacatatcacgcacttgtcaggaaatccgttttccctacatcccctatttcgactttttttttaaaataaatcatatattcgtcgagcctaccgcgccgcggaggacacgtgggcatgttactgttcggccaggcagccactgtaaagaatttggtgtccgaaaccagaatgtttatgggacctcttggactagcccctagatcctggagcaattttcccaccgtcaatcaacgctcatgtgatggttgcttttggaaggatggccggattgtctactacgactacgagcgaactagcactcctgcgggggatatcacctaacggatattcgtttcagacaacactactagaacctaatcgggtttcaatcaggtcttaaccgtgttctcttatcagcagaatatggttgattgtattaacctgggacactgcttcctaaaaggcaattgccgtcacttcgatccgggattggttgaaatatgatccgtcgttgccgaggcatagtaggagccaaccgggtattcttgattgcttgcttgtccagtctctcagcaacatggttgtctctgtggtaaaattactttgattcttgcgctctctgggatataagagctggaatagggtaaggtcgagtgactcacaatcgccgcctgaagtgatgactttgacttcgtaaggcacaaagcctaccgtatggctgattttactcaagctaatcgttcggtacctcatcatatgcttctacacgtgggtcttgggcgtattgcttgatcatagttgaaccagtggatctactgtcctatcggactgaggctgtatgcccactttaccgagtgatcagaatgggactagaaatggcttgcgaaatagaatcgacagtgattgatacatttatcatgtgggtgagatggcaagaaaatctccgtattacgtccgtgtgacattgatagacctcgctactgcctataaggcccatagatttgcactgagttactaccccctgcctataggcgggcgggcggttgaccgaagccccgtgtcatataatatgtccataggttgcttactaataagcactttggtcactgaaatttcataattttacaatgtttagccacatatgtatatatcctatagtactacgtattcaggttatttaagtagaaaaggatacaatggatgtgtccagctataaccaaccctagtaaaatcaatggaatatcgagtctaagtgaaattgaaagtatggtccgaaatgtatagaaattgtgatacgtctgcattgtgtataaatatatacatgaccacaaaacatgctgaacctacaaaaccacttacaatataatgcctaccagtcgcatctgtaaatttattataaacacgacatattagttatactacatactaggattcacctttattatgatcaattatctgctatactagtggttattaggggtaggtgacaagtgatagatttccaagagttgaacccccctattcaggaaacttatataatctgagggtggcatggaccgatggcaaggcctagacattgaccacctttttcaccgcccgatcaacacacatcaacacttaccaacactcacatcaacactcacattaacactcacatcaacactcacatcaatactcatatcaacactcacatcaacacttatatcaacactcacatcaacactcacatcaacactcacatcaacactcacatcaacactcacattaacactcacattaacactcacatcaacactcatatcaacactcacatcaacactcacatcaacactcacatcaatactcacatcaacactcacatcaacacgctcaccaacacgctcaccaacacgctcaccaacactcacatcaacactcacatcaacgctaacggttcaacgcaacaagcattcctagacaacactcatctctgtttgcctaatctgaatgaaagatgccaatttctattgtagcgaggaagctattggatcataagctaccaaaggaaaggaatgtgaaatacgtcatttgatactgaagacgctttagttgttagtttatgattttggctattgaattggcgaagatctaactagggctccttctatgtatctaatgatgacccttcggaacaatgaacagacgatgaagatgttgcgcaggtctttgcttcttcgagtactcttgaatactcgaatactggtctctaaagatgttgcgcaggtctttgcttcttcgggtactcttgaatactctaatactggtccctagcaccacgaagaggtgcctgcacgggctagagggactttttgtcgcagatgtccctgcggagactcttggtttcgcagatgcccctgcgaggcgctttgttgacgcagggcctaggctgcggagaacttggtaatgcagcggtctcctgcagagaacttgttaacgcagcggtctcctgcgggtctcacttgtcatcacagcgtccccctgcggagttcacttggtaacgcagcgcccccctgcgaggattgttgttcacgcagacctatcctgcgaagcacctttttacactcgcggggctcgtggcagcgagggagcgcaagtcttacatcactgggcttgtggcagcgacagccgtggtcacggagactctcaagcccgcaggcaagagagggatactatgacataccggagtgtgaggaccgaagtcctgaatttttttgggctgggaatcgggctccttttatatttttcggctacgtctctaccaaggaaccagttgcgcagttggtagtgagagtcacggtctcgttaataagcgttgaagtaatttcaacgacgttgaaggggtgtttggagactttgtggcctatagactcaagtctcgacctggcctacttcctcttaaaattgtgcgttgagtatggtgaaccactttcatcaactgttgaaaagaaagcaacgccgcaaacgtatggttcgtacatatcatcgaatttgcaattaaatcgcttaacgcgcttacattctacatgtccccattttaaccacggttaccatttcttaatgagggttgaagtgcttcgacagatgccgaaataatgggctggagatggccgacggaaacgctgtactgtacctgcggttgcccgaggaccctttggtctcactggtatcaatcctatccatctctaggctcgcgccgctgaatgttggttctttcctttctactcgcagctaacccatattgcctttactaaaatctctactaggcgcataggcactgtcatacttctaaactcaggacgaagattgtcttcctttgggaagatataatagccaaaaaaggtctagaccctttgaaaagctcataagaaactgggtctagtttccaggacaaccatataaactgatgcaaccaaggcccacgagctaggttctcatgatcgccacccccttgcaagattgtaacgctactatcacactgatgagaacctggacacaaataggaccaggcagcccaatcaaacgctacgcgtgaatttagacagacgcaggtacggttctgcgatatagatctcagcgacgacccacgggatagtagatcagggaggttctatttgtagagagaaaatggaaacaattgcagaggtccagatataatccacaagcctaaagttttcggccattagtgtccgatagaacgggactttgttgcctaggaggtactactggggcaggtgagtatttggaatagtacgcagactttggcgacacaatggtaagctacaacccgatccgtggttgtgttcttggtcgcagttatgagaaggtaagttcccctattaagtggcaagctgaaatttgcctatctggtctgtaggacgttctagatgctatgtatcttctcctgcaataagctgataattattgctctctttaggctataataacacttcctctctatatctccaaatctaccgctatttcaataactctagcagacgtattataaagaactatactaattatagacaaaccacataagcttaaataaaatgcctctgttttactaaaaccggttggcccctggacaagattttattgtagaccggccctcctgcggccctaaactttatttcaatcaatctgcgcctcttgatcaagatgatgaatttaaaggaactttctaataaaatattggtcttactgtagtgaatttatcctatataccggccgacggagattgtagtgattcttttctagttcctatttttaggctgtaaaggcttaatcacaagcagcccagaaagtaggtaggaaaactcccagacttgaattcttcattataaccgcattctcttaccgagcggcatttctatggttcatctaaacgagctctcgaaatgatttgcggtcccgctactaatcggcagtcccgctcgtggttctgtggtctgtgccgaactttgatttccttataacttaggcgtgggttaaaagtaaatcggattcactctatagatcactctattttcgaccaccgattcaactaaacctaatcatacatattctcttaagctaataaggttccagatactttcagtcccagagtccccttgctatcctgtcctatctccctataggaacgcgtatagtatcataagtccttatacactatccgcagtattttacagctatatagaccattcccctggtctagaatgacaggatgaaactgtgtcgctgggcctactctcagatatacaatcatactcgaatacttacctttaactttggaacttccttaccactgttgtaattctaatactataatcacgtttcgattttgaatagtaaaatacaaatagataaggtcagtaatacccctagatatattatgtattattactgatcccgcctcgttgttgtcctaagttaagtctcttagcttaagcgtcctaagctaggtaataatcaacccctaaatcgctgtaaaatggcgcgaaactcgagttcctagcagcgtactatagtcgtaaatgataagtagtaagaacagtctcagtatattataaataaccaaaattacactttcttttcgctacggatactggtatatgctagtattaggtgtcctattaagacgcattaattgtttttctatctggatcgtgctgttaaagtgttatcggatcttaggagtcgttctcagcgtgatataacgctaatatgttgagcgtaccccgtttactatacagggataaagagagaataacgaataaccttgtccttagtggtaaaataccacccccccgccccctacagtttaatagtaacagttagcaataaaagtaatttcggagcaattaagtaatccaatcttaattatatactaaatttgttcaagatataacgattttaggtcttccgatatccttaattagtaatagacttggttcggtggtaagtaaggttttcactttgtcccaggtacttatactgtaaagtcgggaaaaacagctgatttcctgtgattgcttccacaagcatatctcgttttatattatcgcgaactcttgaataactgtagatcttatgttctatatcctccagtgcgtagcttaatctctacctaaggaaatatagactgggaattattgcttatatccgatacgaaggatattcgaagatagtattatgtttaaggccttccccctcgaagaccgcaaggatacgatatttattagtagcaataccacctttaataaggtattccttataatagggtgactttcttggacctagccctgtatcaatatatttaagcctagaagcagcttcctccgcactatatacgcctgccaaaccctctacctatatagtaatcacaataatatcaactcttccttcatcctctagtattttacattactgtatggcccgcctctaagtgccgaaggataggaaccgcgtaggtttttagttctaagagagatgattattaaagtctttccgcgatagcgggcttttgtctcttttccgtacacataagtagccttctctgaagcttatattactgctgcactcagcgcaaaaaaggatagagagttttacgtcagctggtaatggatcgaggaatatcttaatatagtatttaagatatactagaagcatataactcgaagtacagtgagaagtagtatgtagtctgttcttggtggcttagttgctacaaactgaataaataatggatcattgccgcccagtgtataaggtcgaccgacctttcgggtagctattaaccatgtgatagtctgcatatccacaaaaataataaaggttataacactatataactacctaggcaactatggtgagttctaggtatttatatccatattataggttatactaacggccacggaagaaattcggtactaaggttatataatacttacgaccgtctaaatatgatttattatatatacaattcgcgcaggtaagaatactagggaggtatatgccatattttgaagaatatggatctcgatagaagtcactggaaactgcctaagcgaactttccgacaattgaagttatttccctgaggcactaaggagatatgcctcaatctcttattagtataaatactgagcgcgctcgactggtatattgtttattggatatctgcagtagaactgctctagcttcgttaaggcaataaaggacaaaacgatatatattaaacctaaaccagctatttagaaagggccagtaatattgggaatactgagactatatccttttaaaagctaattactttaatctacagttaaaattgtctaaggattagggaatttccaaatttatatagggatataaaacacattcacgcggttgtacagtactcggatacggatatagatttcgctgaagaaatttaagacgtagccactatcgcttattcgatatagtaggaaagaatagcacggagaagaatctattatagaaatgaaaaatttgttacctttatatatacctgtaaactaacgggagcttatattccttacagaataagagacctcttttaggaatttaaaaaaagaaccacaaagtaatgtatatctcggctatattttctctatctgacctaccgcaaataatctttttcatcacattatttatactttatatggctcatcaggctacattggcgactctatacaaaaaggttattatagccttaaaaaatttataggaaaccttcggaaaagggatagcagagcgaccaatgacatactaaacataagattctattaaatgcaaccacaaatatatcgaggctctgtaagaaatagggatcgactagaaaataaataattacgcttagcgtttctgcgttacttctatacgatttttctaataagggaatagtaggtctgccattattcaattgatcttcgaggacttgaaaaatcacccctctaatttaatatcctatatatagtatagtttgtatttaaggaatcgctagattacattttggtatattggtaggtaagtagtagagtactttatgccctgaatggacgcttatatgaagaatttgcttgttaggttgcttggaaacggctagtggacgatgtggtgatgaaattcgaagttaaaactgtagtaaacgttacctactatttctatcctgtggtagccttcgatctactaaataagttggttctgcagattgttagcaagtgttagggaagtatgcgcatttctaaaagattaaaaagagttttaggttcttaataaaggcttatatatatcgctgctttagagtcagggagctgggtaagcgcaacgtcactttgaataaaggcgaggataatttgtgctagatatatatagcaaaaagcaacagatctaaccatgaccttattgtttaatcctcatttaatccttaaagattgtttgaagactattgatgattatagcttctggtcttagagtataatcagcggtttattaggctgactaagtctaacgagttattagatcatggaaaatatgctctaggggtgtgtgtcttttaagtcccctaaactagtttcgacaaagcttaataagaaataaaagaaagtaaacggctaaatctatatctacgataagctgcgagtatggtcttttactatttctcttaataaatgtcaatgttctaggtggaagagaatttacagataatcgaaaatgctatttagataaatcaaagtatctatttatcgttatatcaaaggctataatatgttaaaacaaaaatcttccaatatttgatgtcgtgaaagtataattaacctaacccagaagtggatggatttatttattataagacccgcatctgatggaatcatgaaataatatcattaaggaccttcggtatttatattagctctagtaagattgtaaggtctggtcggaatggtcagtctgtacttacattagatctaagaataatacgttgctctacgatatttagcaatgtgctacgtatatctaattaggtaattagtgactgtacctgtagagccaaagatatataaacataggctaatcccgcctgcttagcctatagatagctcttattctctagatttagtaatattgtctatatacttgagtattaatatttttaattattaccacctccgttcgaatacttgtcggctactaggtactattgaacactgtaattgcggaaatatttactgtggctaatactagcgagctactcctaggtacaaactgtgcgcttatacacgtaggtgagactattattagttttttgattgccagcattggtataaagaagaatgtatcttaaggtaagctccttaaagaaggaagatacctagtctaataacttgaagatatcgtggtaagcttgatggcttaagccaaggacgtgacctatcaggcatttatagtaaggcaatccggtatcggagctttattagaataagtctttctaagtagagaatttactattttatagctcttattagcccttaactctctagttagagctgtgtggtaagtaatataaaacttagaagacgtagtaagggctattatgcttttagagtgcgtatatctgtatagaactaatgatttaactaactagccaaaaccctaacagaattgtcaacacaaatcgagatggcttggatttaatagccggtttcgaaaaacaactttgtactaggtcttacttgtctattctactcgatatagaaataagggagtttaatatagcggccgagggcaataagatctacaatatatcttcattctattatacgtttaaaggaattgaaagagtgatagagcctatatacgatggtggcatatccttctaggtatcgtgcttattatttggaaatcctaggggtatattattaccgtctataactatcgtggaatatgattagttagtggatctaggaaggtttcccgaagtagtatagcttaagacactctctgtaggctttcctacctttacctgtgaactttctataggctgtagctttaccacacttgaagattccttgttacccagtgtttccgctcgactacctataaaacctcaagtcaccgttactagccctaaagtaaagattacgaacgcctaaataggagaaaatagctagaagctatcaattctatataaaacgaagaaatgcagataaagtggattacttcctctataagatactttcttttggaaagagattaaactgagactctaagctttggttaattcttcgaagcctttaatcaatagactatttactattttagtataggtagccagtgccagctcgattgtgtcactttaggaagctcttcgctccttataggttattgcagagaagttgtaatcggaacggtatgtacgtgatttgtctagtagtatcaggctctaagttattgaagatttataaggaactattcgccactctaatatattagaactacactatacggtctatctataccgtagctgcggtggtagtgtataatccccctataccgacattattatcgttaatagggactaactcgggtcttaactaaaaaagaaaggaaacctagtgaaaaacaaagaagctgaaatcatagacttaataatagaaagaattttcctatgcccacgggatttagaataaaacgtatataaataacgaaaagtatcagatttacgaagacttggatagaggctatagctcttaatcgatcagttcggctataggattatcgggctgttatcttattatagcagctgtgatggtcctaggccaaaaatttctatgaatatatatatctccctgctttaatgattactaagaaagataagtgttaataaatacaggatacttaccctaagcatcgagatcttccgagaattcattaatatacttaaagcttcctaggggtagaatcttcgtagaatgagtgacatcgtgattctaatcatttattacctagtctttaaagataaataccaagccgtaccgttccctatagaggatatagataccgatagtattctctaagaacctaaatggtctaaaaagctatttagtatcttctcttagtttattagagtaaaatggaactaaaaaagcttattttattgtgataaatatatttcgagtcgagggataatcaaaaaccaaaacgattgatcattttttattttttttattttttcaatcatctgttagataaagtctctagataagcaatcactaggcgggataggccagggagttttaaagctaaaaatacgcttaactgattattgggctatatattcgcctaactgcgatcaaataacaagcaaatgtatatagggtggattagaaacaaatcctaaactctgctttcttagtacaaatggacggactaacgaattatacttaaagacttcatataccacgctataatataagcagtctggtattaagtataagcagtctatcaatcgtttttagctgtataaataagctaaaaaggtagattagctgtgggaaagagttaagacttcccgtataatcgctgataagatagtcttacaaaaactataactagtatccctacgctaattattccctactttagccactatcaacaactgtcggtcgatagtcctagatatagtatggcgcaaagcccttagtgctctagaccccttatggcgtatcgaataggataaaccattttaccgcctcttttaagttattaacttcagctagcagtcaccacaggtaatttaatatctaactaataatagcctagtttttttagtaggaacctaatatatatcgcttgtagtaatacagaggatagagttaaaatattagcaaattctctgttgcagtttttcttatacatgatttctataatgatgctattcttatatattataccatacatttgacctactgagctaatggcttagcaggaagataaaagcttgctctatataggctactattatagagctatattcctattagctgcttatattaaatatgtatataccttgattctcttcctcaactatataagttttgaaaagtcggtgtatatatattggcgagtataaatcacactgattatagtggaggaaggtagttattcttcctatactctttacaagtaaattggcacaatgaataccataacaaacgtcactaaggctaagtaagtctgagctcttttcggtatttaggcactgcctgataagcttatatacgaagctttaacagccgctagcgttgatccaaatatcccagatggcttcaaaacgcttatacaaatcggaatatccttgattaatacttcgattgcgaaaattggtcataaggcgtctaagtctactaaaataaggggcatgttaaagaatcagagaagaagaaagccttctaatataatataggattgatatcagcggtatgggccaactataatactattaagagtcgagcctacattgcgtaagggaacggtattaataagttaattaaatacagcacgagtggacacagggctgagaatagtctcgcttcggccgttagcgcccttatagtagtgattgggatagggaccggtagtttagatctagtgttagatagtatgctgcggcttaggtgagttagcttaggccctttatctgaagtgtcattaattctgggacaggtttcttcgggaaggtaagggaaaaatgcttttagaagcttacgagattgccaccgcttaacctatagaagaagacttctaaaggcctagatatcttccaagtgttggcgacatctcactaatccaatcaaatccactatataaaactccacttccatctattctgtctcctgataacagggccattaatagcgttcgagttggtacggagcagatagttctaagctctacaccggatatcactatacctctatcactgacctttagcgataacctggaaacctaggctttgaatgatttagatatacgttctgtgaattattcttgaccctattctctagagggcgaggtcctataagcgataaacgtacctgtccctctagatttagaatatcccctttatagctcttataattgttccttaccgatagttcctatgaccgcttgcctcttattataagatctacctttatatattgaggaacactattaggtaggcctagagcctagcaactaaagtgaagcgattgtttaagttttaaaagagctatatatcagccaagtctctagaaaacggcacagcagtacctaactgagtaatagaccagagaagtgtgtagcgataagtctaaaaatcaagtatagtggctttctagagagggaaagctagaaatgtgaagtaaaagggcaccctttactgtatgaaatatatttctaaagatatatcgagtaaaggcttctaaccacactccgctcttcggacctattaggaaccattctcattcgcattactgatactggtgcttttatctgtctaaaaaatgccctgctaagctctaacttatccttaggagaaatagtattgcgacagatatctaagaaggaccgatacaaaattataaatcgtctcgataggaagtttgctcttaatattcttcttaaacgctaccacctaatagaactttttcgagactgtggagggctttaaagctgtacctctacaaacttggttttttatatagtcgaatccttcctacctaaggctcaaaaaaagggcaacctaaatcacaatgataatactatgattacagagagaatgataagggaggtctttccacaattatcgacagataatcctaagtataaacgaagatatagggcaataacgcgattacaaattattggacgacgatactaaaccctagtaaacaattttgggcagagtataatatacctcttacagccatacttattaataggagagctggacaaaggagtttcagataatatatatgtaccctgcgggattatacctataggtaactaatattttaaaggatctacgacttgaaggaggcggactttaaattgttagtcgaactcctagaggcctcttagggtaagctattacgcgatctttacataaaggcaaatccagtggtagaagagctaatatatggctattaaactcgagcttatagactacggttataagaagttgaaattgaagatatagtgataatccctaaaagatctcccgatctggaactgttacttagctctaaggattctatatataaatatagagtgatagtatgataaagagaagctgaactgcaatttaaggtttttataaactaaggagtatgagttacactatatgtatattaaggaaaaagattattgtccctagtttcctaaactgtttctaggtccgaatgggtaaaagattgttaatttcagctgagctggatcgatgtcaaatatactaggtctgtcaatagtcgattaaggaataagaatattttaataacattttgaatttattttacgataaaagtccgctgtctgcaaacgagttttataagtaacagatataatacgatttacccttctatttaaacctctgatatgactctgcgttaatataactataatataaaggaattttttaattcatatgttcgtcggtcgactatactctaactctaagtcgctatagtgtcaatctaaaaaagtgttaatatatagctcttctcttatgacttacaactgacaaaccgatctagttatgctacctaatccttatctgcttgagagtagtgtctagctttatatccctcacaaagctaacggttatagggacctttgctgtcataggatattagaggcctctctatatagattccgttctattacctgatccagtagacgatcctctcggcatataactagtctaataccggtcggcttagccagtggcaaaatttatagcgttagtagtataccctcgtattatatttctgccctagaaatagacgaatagtgatagcgatcatgttgctggaccatctacgagctctataagctcgattataatatataaagtggcctataacgtttgtatcacgtatattagttgaacttatattatcattattctcgtagaacttatagtaaagatctggttcaactagtaaacttgataccttattataaagatttttgtatatagaccatgtagctataggcttttgtttcttagccggaagcatttgtcgcgtataaagagttaaaaaaattaggaatatttttgctgtttagatataagatttactaaagctcgtagatagtagaaggagagtgtagatttatagtaataattagaatgcggtagttaactctagttctgactgtcgaagatgaagtatttgtataaggggagacagaaatatctcccaattgactattccaaagtaacgttaaaagcctataaatgaaagacctgccttgatatcaacctacttggtcattataaccttaaagtggacgtaatacctgcttttagaaagataaataccttaatcttagaaaacgctcttactagccctagaatcctttgcaataggtagagtgtaattagaattagtaaacgaatctataatatacgtacttttttttcggtacgtagggggtggtcgatccgctgatctatttcccgattgaattaaaatggaattctgtttaaaagactgaaaaaggcaaagcttgtattagaagatctctaatagccggttagtaactataagcgaatgtagtttcacgttaaataaaacgaccttgaatttttgaatagcaaatattcctccctagttctatagtaaggagactgcactctaggtctgatataatcaagacagcctgtagaaagaatgccccctgctatatactctggtatcgaggaggtaatatgtttggaaaggaataggcggtctagtggaatataaatatgtgtatctagtaggctgccccaatatttgttgaaacctaagctacttattctaataatattaactactctatctgtatctctaattcttagtatcactatgaccttaatataatttaagacagaggcgcttgaaggcttatatactcaagagcagttagatcttttggattctatcgataccctccgatcctaaggtattagccactatgtctcctttctatagatcattgtctgcagtgaccaatcttctggaaaaagctctgttcttaaagctatctccggtatctcttttccggtgaaaagtagtctctgtactagatttctaactgaattggttctgtggaagaattcgcaagtaggagtctgggtttctattatcccctattaatcctgtagcgacgcagagtagtattcgcttagcagcttttgtgaatcactcgatgattttaatagtcttacagagttgatagagaacgtaaaggtagtaataggaatctcgatctacagaaaagcgttttcgaatgaccttctgcgagttaaggtctctggcctagatcggctatatcttacaattgttaatcttctgggactaatctacttggaaacacagtagtagtcggtagccgatgtttagttagttcaagatgtggtctaattgtatatacaagagccccgaagtattatccttactatcgtctctgtaaagaatgactttataaaccagatcgttctacgtttagtgtgggatactaatctatctggaatcaggactctaggcgttatctctaagcctaatgtattggtgctaggatctgagagtgaagcttcgtttatatcgcttgctaagaatcaagaggtagagttctgtctaggatagtatgttttgaagaatatagactcggagaaaggtaagtcaagtctacttgaccgaaacgttcgggaatacgagtttttctcctaaggaatttggaaagagcttctgccgttacttataggtgtggactctctaagaacgcgtctgagcggtctacttcttagctagattgtaagcgaactccctagccttattaacgagatcaatgtaaaagtcaagtcttaccagttacagctgcagaaactcggcgacccttgggtaatagtatttgagcaaaggtcgtatcttttgcatataggtcaagctttccagtctcttgttaaagcagccgtagaaggcatatatagcgagcctttctttagggatgtaaaaatagatactggctgctaaaagcgaatctgagtagtcatttagaacttgaataagtaatttacgaagaagatctctctgtgcggctattcacgatatgtcatcacagacaaagatggacgattggtgtctaaatattaaatatcaattatatgagacgaatatatttagtatattgaaatacttcttaagaagataagaggttgagagttgcctggaatatataatcctatgatcgtcaaagatttgttttaagaacagtgtgccctatagggagatattacgtaaagctatattgatagggcttaggtagctgtaagggattttcttcaatatgtagtctgctatatggtagacggggctacctcgaaaaccatttttaataagatagttttactagctctgggaagcttacagtatgccctagaaaaagggagtagagagtttcttatatcgtattaacgaggctatctaattacttacaattactactttactaaaaccctgtaagatacttgagctaatcgccaaaatgaagcgttccgtaaggctttataatcatactttggggctgatatactttcgacctcctaccctgtgggatatactattaatctctggggcctttacaactcccttattcagaaaagcatactagatatgactcgatttacttcagaggaggcactggactgcatgcttatatactataaggtaagacgtgtgacctctatactgttctaaatatcctattaatctcgatactgctgagtataggttatactgaaacgttttgttaataatgtcgctactgaagtgatcgaaataaaactccttaccgttctaccagtactctttacacctattactgtatttgagatgcctgaagacttggtctctaagatcgcaggtgaatcggaagaaagctaaagcctgagggagcagttaaatagaaaattgtggattctgataaagggctctgatatataccggcgttttattagtataagaggacttggtaagggaaataaactcatattaggttatatatatactgatcggactattagatacgaacgataggcctaggtctagggcttaacaggactaggaagcactgtctaagggctcttgcagcttaatcgaactacttgtagaagctgttagtagtggctatgatttagaaagtgtagtcctattgtacagccctacgttattagaaccgactccgtaacccgagtataccatcgagtagcatactatagagccgacgccgctgtctataacctctgtttcaagtataagtggtaagaagaagaataagaaaggaaagactaaagttcaatcttctgtcgagtccctgcttaggtaccctgagtagggataaaaggaatttaaaacttaatctacaatcagtctaattaaatactagccgataagcgatatacgtgttagaggccggtggagcgtatatatttcactcgttttgatagaaaaggttgagctaaatgtcttatcccttctaatataaaatattttgatcttaaagtgagtaaagtgtggctctacagttcgggtccaatgaaaataacgtcgcacattttgcgacgctatcaattctgtatactgccaattgtaatagggtcaatgtccctcgaatatgactaaaatagaagaaatgcgactactattctgtatttacttagactctgattgacggaaggcgcttagacttaaaagccgataatacgtccctttaactttacttactgcttagggtttaactttgtaccgaagaaggggggtaatgtacagataattttgaaataagaattcttattagatatattggtttctaccgtttcagtaaacttagagctcaaaaatgtagacccttaagggtcatttaggtcggatcttgccagtagccctcttatccgaccgtataccactggtgttatagacttaacagtccaccgctttaataagcttagtttaatctatctcttctgttatgtatacttctatctaactaatctaaatacgtagtattataggacctgtatgtggctaaaacattgtaaagtaaatacgtgtattaagggcttgttaataagcggccataggctaactaacgctatacccgcctatagacaggtggaagtaagtcattgcgaatctataggcctcgtaggccgagtcgaggtcgattaatatccctagatgtaatacagaggttttcttaccatcttatctatataatagatatatcaatttattaattctatctcgtaagctatctctagtgccattctgattactcggtgaatttatatacagcccctacttcgattgagctggtcgaatgcaaaccctagactgccctccgttggttcaactatatataggtaatacatacgcttaagattagacctaccaggtatagaagtatttataaggaaccgctcgaaataccatttattagcttaattaaatattgtgatataatagactctgccttcttattcgaagtcattgcttcagtcggcgattgtaagtcacttaagcttactctactataggatggctatatcctagaaccatcctaagggtgaaagtggattcgtaataaagaaaactaactaagaatatccgatcggctcctatattcgggagtcactgtaacattataagtaatccccctgttagtaattacaatttatattataccctatatattaatatctagtactatatccgaactgccggtcgttgctttccagggtatagtacccgggtttatacaattaagcttactctactgccgatagaacgcagtaggatagctttaggtagtattgttatagactgaaacttacctttataaaggatatacttgaatagtgatatactaaatatcgtccagggtatggtaagtttgacaaatatatacttaatactaaaaggatagccgacgtatagtatatagaatccgacgagtctatagcaggagctacttgcgcgcgataggttagaaaataatatcaatagacagagatatacagctagcttaatgacctgcagtttcagtgatatccaaggcgtatacaactctatagatatctattagggttttatagaggaataggtgcttaggatctaaatctactaaatatctgttctaaaggagacatttctgataccgacttgatagctttatatatttcccattggtccgtttccgctcgtttatatatctcgaatacctaagcaatacagagtaggattagatgggatagtatcggacggtatttttggctctttagttagctcggctgtaccttggtataaacggccttatcttctcggttcgtagctagtaccgaaattagcctataggttagaaacgaagggagttttaccttaccttccccttatacgcggatttggactaataatatggctaacggcgaaggtagggctcccctactattaaataagacgaaacatcggtatttcccagtgcctataggaaatattcggctttaaaatatactagatactatctaagaataacgtggggccacctattagacgctactagtccaattcacaagggctattcgttcacaatattcgaataagatacacagtagtataagccattggaatttagggtatatatggcgtagacgcattagtatataacctaagtgaggtacagagtcgattgagagagaaaggcgaaggtaaaggcgattagaactttacattagcttatcatcgatactactaatggtcatttcggggtaatagagtataggatcacatcggtattagggagcccgagtagataatacacttgcacgcttcgacttaagtaacaggaatataacagtaccccctattatacgatccgattcagtaaggcttgaaccactaagacgagtggttataacttaccagtttataaagatcgcagaatttttacttagaacaagtcgattaattagctttatggttatatcttaccgataaagatcacttataatcgtcttcagtaatacagtcaccatttatactatattaatataatattatatctagttcgttatactctctagctgttacttcgaagaagccgcgccggatataccaggtaacttctgagccctaaaggcgcgcgacaaacctacctataataagaaattgtatagttgtaataggataagacctcgcgatatagacggcaaacatcctaccccactattatagtataaaggcggtacagtcgaagggggaagacacaatagagtacatgtcgtagtgacctaggtcttatcttagacctaggataaaaggactccttacaagtatatttcataggtggcgatgggctgctcctatctataatagtataaatattagtaatagtattcgtgttatagagcgcaaaatattgtataaataactagatatagtgtagtagaaggcacgataaatcacttaccttaataggaagaatggacgttttaagcttctatacagcgaatttcgcaatcggatattcgcaccctgttattagcccttttatttaagttatatactttacctagggtatgctgtatggtataaagtgataggataaggtctagtgtatcggctatagctttatatagaatactaatataggtactgtatcctcggggccactctggtacaatatcaatggttccactatcatacatttagcttatagaccggtaatataatatatgactcagatggtcgggtggctaaagctatagacgaagagatggtaaagagctgtagtccttacgcttatacgttatggtcgaatgtccttggttctattaaaattacatcgactttaggatcagtggaactccagaataggttaggctaagatttatatacctatagtgtagatagtagcctttttgccttaggaatatatataaaggcggtacactagattagtacagtcgactagatggaccttattagtagaaaatataactcgggggccggtagaatcttaacgaattctcttacttattaatttgactctaataattaatacgttgaccctagaaaccttaatagcaattctaggaggtaggtgtcccttgggaactctaatctagctcctagggctatatcctagtgttaagaaacaaggcgtgacattaattacccagtctttttaccgctaaaatatataacttttttgactaagcgttttgcttattaattatgtcagaccagtttgttaaatttgggccttagttagagaatcttactatcgtgaattttactaatacgctcaccataccttgatttctgtctaatacccttattatacgatatagacctaattagccccctatggagctagctataattgggataaggaaacgcagttattaaaccctaggttttgtcattatatatgacctttttagtagcctcttgcgatggtaggattagcttattacagtgtatacgtaacttttttcccgattatatatataaaggatatttcagaatagaaaaataaagaatgcttagtaataatagatatatattgccagagtgtttgaccaactaccatcttattaatttaagtgcaatcctaacttcccttcccctagaacttgctagtgttactatttttgttccttagatatatctaaatcattagctttatacgttattttacctattaattatctggcgtttataagagaagcccctagatatttttttttttattcgaactggttagtctagtactccgctggatttatagcagcagtaccttagactcaactatatagtctgagtctgatatagataatgccgttcgtctaagtaaagaaaatttcgatcgtatcctttccaaaagctataataaatggtcgtcctacctaataaatgcttataaaaccccttatctcctaccttcttctatcaatctaaaatcgcttctcgaaagaataccgtctttccttagatatggtctggtgcctaaagatactgaactaccctttacttgtattaaaagggaatcgagcaggggacagtttagtctcctaattactagacaatcaatctagactactttacgtaggcaatgttaccttaaaccgaaaataatagctttagatattctgctagctattcctaatctattaatagtagagatatcaaaatctgcccctctgtaagaatggcctggtattaatggtatctcgaaccatgacaagggaaattatattagcgttttgttccttatataggcttatatcctttctgcgcgataggtagaattactagaatatactttaggatactaatatagtagcaaattcacgcataaggctggtcagcttgcaataggtaccagatactataatataattgaaattgatattagatacgatattaaagctactaaagcagcttggtagagggctatattacactctggcggcggctgggaaataataatagattacaaaaaaaaaatatactacttaccttagtctattattctctctaataaagttaacgtagggatagtaggaggttatctaatctctaaggtaggaccgctgttatctagtactgctttagaatatctagctaggttttactcctgttaccgactctataggcagtgttccatagccctagttactgcgctttatatcctattacttagcggagattccatttcacttcctatcccaaaatcagccttacactatggactatcgtctctattataaaaatccttaaatctagtaaaggaatactctgaatatctttcctattatatgatactgagttataatacatagggtatacgatctttactttccagtaccttctttaacagaaagattaaatgtaaccttattagcgcctagcttaatcctatctttataataataaaccctttagtctagggcgagaagcctcttacactcgctaaggtccttatatatcggcagcctagattagctaacctttggctcagtataattgtagtaggactagtaaaccctataatacaaaatatctagatcgggcttatagccacagactttaatacagcggcttagataggaacgtaccaatcttttataactgtagaacctagtactaataacagttaaatgatctatagggaagacgagtgtcatttactatttattatagcctataatagatatactagaccccctatttatccgtagaaactgtttagagaaactcgacttcttgatactgaaattgtagtatagcaatataccgcttaccgctattactgtttaaagtataaaacctggaattagaatctagtaaatagagaaatgctcgaagactccagtatatctctgatagagtttcgtagggaattcctaataaagaaatataaggaaaactactacccaatataaaataacttaaacttgttttcctaggtagcttcggaggctgtaactcgcagaatttttagttagcttaggtctacagggtatctagtaaataaaaaacctttatatcagtattcctggatcgatattaaaagctccgacgacaacggtgatgatattaattcagatagtggtcaagaggatggttattaatcgtttattagttaatggcttagccgtataaactaaagtatttagatcatcagatcaatccactctttaaagccgttaggcctactagtagggtaagccttgtattttaagtaaatagcctatttcccagagattctatagtcgcctatttagcaaattttctattatttccgataacccgctgctttacatatgtatctattatatatatcattctagtagttatactttgcattcctataggagccagcttaattagaacttgctgttattacaataagggctattaaaggagacggctaaaagtactttttaattagtatcatccgatattatatctctctactttatatctattaattttactaacaattttggccctcgaaagatataatatatagtagatttatagaattgaatatatttaaagatatcgcgtactgaaatgtatattattatactaaaatctgtgcttaaaggtatatagtctacagtatagctgtctatatatccttctagtcgctaaacctaagtataaagacccgtatatccctacggccaattaacatatgtattttcctagtatcatatcataagcgctaaggtgatccgagtagtattagaataaatatagagtaggccagcgctataaaacagcctattatttataatcagaaagggatctgagctttagtatatatataaaatcaaattatagcctatctcagatataggtatggctagacactaggcgtactgctagtcataatgaaggatataggacgcgtctaagactaagataggtaaggataagctaggctgcaatttcctattaggtactaaagctcataatatagttactcctaaaatgaccgattatctataacatttaggtcattttatataccttaaatcatataattaacctaaactcaagagcggtattcagtttatcgtcccactcagcctaactttaattctaaataccataccccaagagcaccttccttataggctaaatactactaggtcacatctattttatatacttcgtatggttattagagtttagggttacctagcttaattctcttccaataaaatagatctcctaggtactcgtttaatatttcatagtacttactagataatcaggttttttacctatcggaattttcccgatagtaatttcgatagttaagagttagagcctctagataaagaggcttaataagaataagcaccttttttaagtggtctatagtactttatttatagcagcggcggaactcaagttaaacctatagtatataaatcacgcgggagggccgccttacgcacagtaacttgacaatttattatgtgacttcgtttccctttctcgtcctatatggtataagctagttattacctctaaaggggttctaggtattcgcagaagcatctgcgcccctcaaccctaagtaggctagagatagactttaataaccccgataatcctagactcctagcagttactatcctattaatatcttcctataattttatactatattaccgcctctaagagaagcgaactaacgtagtgctattatatctaatagattatatccaggatacacgtggtttctattagcgccaaggtattatagagtggtgaacttagtacctaccagacaggtaaggctactagttacagcaagcatataattaccgggattctacctaatctatagctttaatagtattaaataatagcctagagtgcagtctatatagataatcctataggtagctaaattatcactttatactttacatttagtattattattagtattacctatagggtccttttacctatctcttccttttctaatctcctattcggtaaataagagtcctacagggatatctaaaggttctatacaaactagacaaagagtatatataaggtaaggctagattatacaagtatgtattgtctaaacctatacggggtaatatataggacttatactgattaaatatctcgagggacttaatctaaatcttatttaccttagctattataatattactaactaagtaaagtaacaataggttctatttggatcgcagatatatctcgcctagagttgacagatattaagaagatccggccatctatcacgaatgtagagcatttgtcttcttataattagatcgaatcgtctagccctactattactatccctagctgcctacctctgtggtctctactctaaacccctaaaaaagtggctaaagactttaggctcatttatattgcttaaaacgcgtttcgctatcctgaaagtccgcttgaaccactttttcgcttactgtacactaaaaagcctttatataatatatatcaagttgacttaataactgatcgaaataacgtccgcaaacttctgtcgttcgttaatccaaatctctctagaaatggactagaacctttcactattaaaattaagaccacaagcaatacagcaatattttgccaggtagaaaccgaaatatatatatttatcgggccataccacttcagaggctatggtcacgagtttgagaaagcgttcataaatacctaagtatccggcagcactagatatcatcggattatctcctataacttaggcgatttgaaattcatagtacactacgagactgacgcttatattgaagaagctgcaaatcttcaatcttaaggtatgggttcggaaaataagaattttctgaatatgatggaaaatctatctctttcgcgacccgaaacttactctcgtcttattaccgagtccaaattagtggtttagaaaaaaggaaaatctgtcctaattaatttaacccttaagatcaaaacacaagtgtcctataagccgtttaatatctaagaagttcttccacagctataggtgttataaatacccaaccttatccatgcctaccacaatggtagtacatttagactgccggaggttaaagatgtcactcgtgagattgctgaataggaacgaaactatactaataacctttagagattggttgtattagtcaagggaatcattagagtagtaagagagaatggtaggaatactgtcataaaatataacggtcgaagtgacagccttacagttttaaagagagaagggagtaggatattacctgatgatctttatttgaaacttagcgacaaaataggttcgactaaagcggttaaatcaaattctcacaaaacaatactcgaaattagggatactttctataatattaatatctcgacgatactatatttatcagcctttgttagcttttaatatctttcccagccacaaaaaactgaattcatttatagtaatattgctttatttaacattgctctcaggggcttagaatcaggctatcggcaatattttcgctctttataaggcgatatcccttaatattacactctctgtgaaacatatgatttcctcggggttaacgtacttaccaggcagtcaattaataatatttttgctgatttaagggcctgtaaaaccgattataaactcgggtataagcgttattaagctgtaaggggcgataaatctcgagtataggacgcggcatttcgacttctatttctaataatatacagcgaattcagcgataaaaaaaaagatcctaccaaggtttacaacgccgtgctatttattgtctcgtatccaggtaccttcaaacagggcacgagaattgcaatacagtcggtctttgaggagcgctttgtcgtgtccgcgaagcaacgaagccaattggatcgtcggtaaaaggagaatactaccaactcgtcaggcgatgagaacacaacagaggatgaatctaataagccatacctttctaaccagtcttaggctaacaaaatttatgagaatggtttctttagctaggttgctaggtatctttggaagctatagtagtgtatctaggatttattttctaggtattaagtctaatgagcgggaggtcaaacgtaccttcaagtatgaattcttctgcagagttctcttctttttgtaccgatattagtagttttcgtatccaattatacctttatactcttacgacttaattctaggagaataaatccgacggtctcgtgactcttaattagatggttaataaagccactgtatttcagaccgctttctagactagtagtggtatcttacaatatattgtagttcagaggtatattaattgtgttttattctagagaaaaagatgaggttatatatacaacacggagcccagttgattataaatcaacttagttatctatatagacatttcggagctaattccgataaagcggcttgcttcctaatctgtaccagagtcttctttcgaacgtgacttgtcaatagcttcagctgcacattcgatttcgtatattatcgagggtctccacttaagataataatagatactatagtccattttaacagttattatcgcgatttagcacttctggttttaatttaggatcgcgatttatatagaaaaatctagactattcatggcaaacaacacagcgtatatattgctgggaaactatataagtacttatatgccgaaatcttatcccgatacttatattattaccagtaatattacactctcgcatataatagtttctagaataattaaatctatcagtagcactcacttaagtgctactagtccggtaagtcccgtggctatcggagactaaccagattaagggctcccagctaggtgcccctaagtcggttagcgctcttcgcaggtaataagattctttacgtgatcagaggacagatagatcggttagctgttattagttacagccctgtatttaattggcgactaaggcctctagtcccacgcagtgtggtctctagtatgacagaccctgtcggacgagtgagggccatgccctccgttccccagctaatccaaatcggctttatatatacagcgggccgccgtttaagataattaattaacccatctattcctcctcttctaccgtttttctatctctcatagaaacataatctaatctctttatcctaaataatgaccgaagacacgatcgccgttacttgaatatttccttatttttatttcagttcggtcttttcttactacaggaggatcttgatatccgttaccactatttgtagtaataccaatttaaattaatcttctatttttagtcctaggagctggctggggtttagcgtgaccatagtaccacagagtaccgtggagttctcgggcagtcgaatatacaacaaatttcaatgagtatatatttttcggtctctcagtatacagttgtggaagaaaatattacctaggtacataagcccttaaatcgactagcccagggctccctacttcacttttgagttggttgtatctataaaaggtagccatgaaaggtagccattttggataggcttattagcagaaggcactctagacaaagagaataccattgacgttagatatataattaagggactcttattctagtggcctactttaagttaggaggttcattaaagatcttcttatatatctcagtaagaatgcgagtatcggcgcgaaaggttggagatatgttttcgctttaaataagaaagcctatagtgcggacgaggaggcgcttaagttactctagctcgataagctcctttagacctaatataaaacttgcagatagaacgagtatattgccgaattgcctataaagaaaacatataagtctttcctctatattcgtgatttttaagactagggccagaggatcccttacatataggcagtcccgaagatattggtaacgaccaaccgatatcctcctactctatcaaatgcctccgtgctcttaatagccgaactaatgcagatatagtatatagattttagcttcttcggcagctcatgtaatcggaccttaggtggctgctagttagtagagattacagccggcgtagagcctatatcactcgatatactcggagcgcgagcggagctgtgtagtatagaggggggtaattgttggaatacaggtgattccattaaattctggctaattggaccggcgcgagtacctatatggccgtagtgcagtatataatagagaaggggtcggtagataatataccgggtactataatacttagcacacatacaggcagcgttgatttcgtttactggcggatcactttcgtcctattacatactattaggtagactttcacgctagcggtcgaggtttaggctaagagcttcttaaacggtaaacgaccattgtatctagtcttacttttcaaccttatataagtctgtatatactcgatttaagattttgcgtagatggatttgggtagaataaaacagtattattatcgtctctggtacagtgagattatttggtagaaacatcgtctattttcctttcggaataggtatctaaccttccgaacgggagatattactcgctggaatatcgagctctacaagaaggtcactctccaattgcagataggtctagtacacaaaattgtacaagtccttcatagctcccttattaagttgcctataccgcttagttcttataagaatctagtaagccctcaatgcctaagaaatctaactgtggctctggaaagggtaggccaactggcctatataaagtccagcaagtaagccgcactgaatatattctagcttatttctaccctgcagatggcctagtattacagttatatatctatagagagttaatctagggatagcctagtagttccttgtattcccttatttatcctgtgtatttgtgatatctctccttaataagccttctatatgattgttggatgaactgtttaggaaagcttggccgataggctgggctggtacactatagagaggattcgaaagcgacgtctgtacggccgctaagccagagtttacagagggaagcataccattagtatccgtgacgtatatcgtaattgcaggcagcggagaattgaatggtgccagcggagcagggatatattggttgaggtagtcaatcttcttatctataacaggcctagggagaggggcaggagcttcgcaaatggccccgagggctaggtatagcaggattaaggcagtgttaatgtttttaccgactcgtggccgtagcaggttggagacaggctctaataactcgccgcgcacactcaggttttcatttgactgcctctttttggctagaggcggactattacgagccggttgagcgtagctggaaacagagcttggtggtgagttattgactcgataatagctttcgataaagttatcgaccttaatcccaagttcaccttccataaggaatgggtagagcttgaacatatgcttgaagtagctatcatagtagcgcctagcagtcgtagcatccagatccaagtttccaaattcgtcgatgtcaatattgacgtgctgtcctgcaccgttcacaccgggttgagcacctttagactcgcaatccattggtaattgactgttatcggcagtgtatgagatctcgccttggccgtatatactgatgagactgtgctcttcttccaaccgcatgacatagtcctcatcatatctttcagggtgtatcagcctcttgattgacagccacattaatagcttgtgagctgcagtggtgtgctctactgggatggagagctctccctcggcctccttctaatgcgttcaattatgttctttctaaattcaaaagtgattcctgtgtggacgaggccgtgcctagtgatattgctatctacgcgaagaaaaattatctttataaatacatcatttccgttccgtgtaaagctgtcatgtggagaatgttcgtatcaaatagtgtatgcggcctttttcgcaaatgccggcaagtcagctcttcaaatccaagcttctggcggtacctggggtccacggctccaagctgttggccaaatttcgaaccgctcacatcctgggtctgaggcatcgctgctttgagaggtgagtcctgcctgatgactggtgatggtgggagggccggatgttcttgcacagtcggatgtgtatgtctaacctcttcagctaggttgaaacccacttgctcttgcatttgatcttgccattttgcaaaatgctcatcgatgcggttggctcgctcctccatgcgagtctctatctgggagagtcgatccaataccagctgagtagtcttctcttctttgtgcaacggcacctctttgtagacacagccaaggttgtttactttgcagtggctgcaacatggtcgtccctcgtcacactttgcttttcgagctcgacattgatcgcaagcctatatggttagagtgtacgtgggaaaatctcccgaaacaagccctccttctactagcttaacatacctgcgtagctcgatgtgccttcctttgaggtgctttaagcacctctctttcgtaagaaccctgactgtacccgacatggggcgtatcttttgccatttgggtaacacgaattgtggaatctgagacaggaggcagacttctcgaaacggataaatgttcagcgttgttgacccgatttaggagcgggtagcccatgtgagcgcgaaacccaggtgagccctcgtacggcgcgccctttgttgactgttggaagttttggtaaggaactggaacttgggcagaatctgtgggcgcaggtataggtaggccatgttcattcagtcgaccatacatgctttctgatggaacttcacggttacgcataaaggggtatcttggtcgctgcagcggactcataggcgcatggtgcccttccggagaggaaatgcgatccattgcaaatggagagtccaggtgtgtggaggtgtttgaagctgccaggtacggccgttttgttgtattgttgcaactaaccagggcccttgacatggggtatgtcttgggcgtttactgttgcgaattaatctctcttcgtaaattgggactcaaaccgacgtgacacttttggttggaatcagaaaagatatagtcaatgagaggaaatcagtggattagttgtgggtgtaaactcggcaggagtctctttcctgaccaggtggtccgaggcttccttcctcacatccttggctacactggctgggctttactactggtgggtgccatccctggctgcttagccaattaccatacccgtaggtacgggggttgatcccgctatatgaaccgcacattctccatccacactttatttgctgcacaagctcgcaacaattgtcaatgtgacaggttgaaatatgaactggtagcttgctatggagcgggggatcctagctttgagggcgtgcccggtagggcatggtttaaattttgtaccacccttagtgaccatgaaatcgaccaagaatagttgataataagcggcgaagccgagaatcaaccccaaaaagacatttccagttcttaaccaaagtcactttaattccagtatggagaacaactcaaagcggaagtattgctatcgtggattggatgtaggtaaacgttttggcggtcgtgttgttttgggaacccatccccgggaggagggtataaaatctgaaccataccgtatagggaaatctcccaatgccagaatcacttgccccttttgtgagctacagattccagttcatcagttttacatgaccataattcattgagtgtttttcacgaatagcaatggaagggaaatccgggtttcctgggaagtatctaacggtggccaactaccattggacagcttggaggggattcgcttcatatcgagggtagtcctgtctgatccattgaacttgccgatcgtaacatatatttgactccgaaagttcatatcccttgtgatatcccctcccagaatgatcaacccgactggctccagcatccgcgttccattccgcaccattctcgaccatcccataacacagcaatactaacttgaggcccccaatcggatccacgggctcatacgtagaatccttcgcggagcttaaggctctgaattacatatattcactctttctgccgcagaaatattccaaaaactcgtccctactcatatcgccgttcacaaacttggcgcccgggctaatattgccgtagcctgcgcgaacgggggccttctcttctgcgccatcttgtgtatttcgatcctataaggatgagtaccttgatgggacaggtaaataatccgggaaacgttaacatacggtgccgacgccctcgtcgggcgattcaggtcccccaagaaccggtgtactgtccatctgcttcgcccgttctctaggtttgaacaccgtcgatgtatttctgtcgtttaaacttgatctgtcgtcgaaggtacaatgggatcgaacgtatggtggtgtggcctatgggccttgctattagaggtcacatttgtggaaagtattaattgtgagccgtggaagtacctgaattggttttgtccttatcgactgattaaccttagagactggataagaagactagcgatattacctctcagtaagtaactctacacgactgacaatgatagatctggcagggccatactctatgatcctgatttggtagcgattgcgcggtcccttccctaggttttggtgcctcccgatcggagtgttgattagtccgatgaggcaactctttctttaagtaagtgatagccataatatggatagtgctctctgaaacgagaatagtctgagtatttagcgctgataccgtttaacggaagaattatgaagaaggtggaggtgaaaggagaccagccccttttggatctagtttagcactataataatccaccggtgtgacgtaataacattgtcatgaaactttcagtaaatttactgggtgggcctatatggaaagagctagctgctggggcgtcaatatgaccgtcagcgtaaaagactcaggccgatgcctacgggccttccagctatcgggagccagtggccaataatggctaagccatcatgcgctcaccctaaataaacgaatgatggatctaacgaataaattgtatctatggtgcgattctaaacaagaaatgaggtggactcgggaaggtgaaagtaacaattttcctacctgtggcatttattgcgtatgctagactccaaccgtaagggtggtatacctaccgtttgtatgcacacagaaacagctactaaactggccaggtcatagtgggctaaggaggtgggtaaagagaaggttcagattaaaaactgaggtcggtctgggtcacatcggaataacgacgtgaggcaagagcgcctatcatgatctactagacccttgcaagcctggttcctagaatccttccgcgaggtaaatgtagccaatgcgtgctcaaagccataagccagatttgtgtcatgtataggaaaacagactaccccttgggatctgcgcgcgcattctgcccttaaggtagcaagcaaccttattcctacttattaagcctgctctatgaacctctataagggtaactcaaccttatgagctactgacattttaggttggttcgttattgtagcattatgtcttatgcgcgaaacccatttaatgtcactggcttcgtgttcacggaagtcccaataaactattccattggcccgacatataatccactaccttcggagataggttcaggaagttctctccatccgagcgttctacaatcggaaagctggttaataggatctgtgtcttcaaccgtgactccctctccccggtcaagttcgtcatatcgagaaataagacctcggccagcaccagcattgcctcaaccggaaaccaaaaatgaagagaagcaacgagtccggaggcctaccaaaaagacatgtcgaagggtatatgggcttactggcacgcctaaccaaccagcccggcgtaatgaaacgaggtctgcatggctggttccccgaacattcgtcacattggctaagtaggctctttcagcgcagcaaaaacaccggccatgacgagtcacgattcagccactcagccccagagctctcgctcatgcgattaccctccatataatcaagaaagccctccccaagcttccgtcgaggctctctagaaagccttgaaggcttaagtcttacactcactcagggttttgcgcaagattgctatggaccaccaagcacttaacctggtccctgagataatagatggttgggtggcggatattgaaggagttgatgcaaaaaatatcccaattgcatccagcatggcggcgcagatgtctgttccgttcgaacgatttaccattctcacgaaatgcatcacagctacgggcccgatgcaacagcttactatcaggcaccaggcaaccgagttgctgaaatatatattgacttatgcggaggagtactacttagtccagggttcacaggtctatcttgatattggtagatggatagaaagactcaccaagacaaacatgaggaagtgaaatgttattatccagagggtctggaatattccattgctctttctatggaattatgtgtaggatgttatcttcttcttgtaccagatcccttttcaatattatgggaatatgttctgtaatgtcacatatccgagagtcccagtgccgctatccccgtattagaccggtgaaagcttctgtcctttccctgagatgggtgtcaagggagtattccaatgttttaccgattgctcacctcggtacttccatcgtcctttgcgacacagaatgaatatcatcatgtccagctagtattattccagtgttatgggtgtcttgttggttccatcattgtggtcgctagctggttgggatgcacgggtgcgttgagaagtttcttgtaaaaccgatccctaaggcctcctctgggctttgggaactggagtataattgctccataggtgcatcattggtacctcttcatcatgtggcacacgggattggaccgattctttgacggaaagatcctgcaggaaaaacgtaaatcattagcctatggcttccactgcgaataatgattccgaggttcaacagagggtttgtgttactacctctatgaaaatcctgttattgcatccgtggctttttgaaacggccgcctcctgtttgtttgaccaaaatcgacagcggatagggaacaaatcttcgtctacaaaaagtcatcagcaagccctaaagttgtgcgactgggcctacaaccactgaatggatgtgggaaaggggaaggggaaaggggatgctggagggggaggcgcggtgaataggaagccgacatttcttgggcacatcttcgatctagacgggatgcttaatctattaacccacggtgagccatttgtcagtatttcattctcttgctgcacggtgaagatgcagtagcataagagtatctgagaagttgcgttgctcacttgcctgtgatattattcgtgcacggccgttgatgggaaatgtcaaaaagggctttcgattatgtatttgtctgcccgtataaacaaattagttcaatttcctctagttggatacctgttgttgagtcctgggtgcgaggcgtgagcttgaggagtgaagagatgaaccgctgactgtcagttttaggtaagtcagactcacctaggccacctactttccacccttcctagagcatccgaccatcctagccctgcttgcctcatgccaccattagtcctcctaccatcagatacaatccatccccggttgcaatgtcacttctgcacagtttctcttctgctatgctcaaacttactgaatcatccaacttccccccgactaaagctcttcgcacctgagtcggaaacgtcttagccatcaagatatgacatcttactccgaactttggctggactggtttggaatttatcgtttgattgcaatttgctggtccaaatgataattgtcaggcccatcgaactactgacctctcccatctatctcttagtcaaacgatcgcttgtctttgctcgaccaagatgccgtatagcacaagggtcagcacactaccccaatgttatatgcttcgaacaaagggatcctctacacgactggtgagatggtttggtgtgtcttgaaggcgctagtcagacctccggccagaagccctgcggctccagtgggagattgctcgcgcgcgttgctgatccaagataagttgaggtaagccccctctgtttaatctgtcacatatcgtaccatactctgactctatctcttctgctcaaaaggatgtcgctgaataccctcagctggaatctacgcctatccaatcttcaatcacggtctatgattcttgcccgcagaatatccataccccacaaagcccgttcctttatcctcctactgcgctgggtggtagagccactccgcgatgatacgactgaaaaatcgaaggggagggcgaagggctaaatcgccaacctctcgaaacacgtcattccagaggttgatcttccaaggtccaccgtggacttagctaactatggtactatgggagaagtaccctatcacacactgcacgaagatggtaacaaaagcattgacggggaagctgaagagtttattccatggctaaaccgagatttgggcagagccacagatatccgacatgttgctggtaagccagaaagcacattttctcatgtcgatattgtcaactccttcaaatgtgcatcccgaggcattcctctgacctgactgctttggttttcatatctctcttctccatatcaccatttgacttatgtgaccttgctgacggagttttagttaggcacttcatagctgtcagtccgggttaggccgatagctatcctgggttagggataaatgccataaattgaatactacccgactgtgcggctagatgatgcaattatctgccatatactgaaaactaggatatttcttcggaacgcaaaagacccgaagacagaatattgtgttcttatggtgagcggaaatcatcacaacaaggacaagtttcaatttgctacaacatctccctatgctgagctgactttgcatcctcacccacctcatgttcctgacgctagggccgaccatgaggtacacgcttcacacactctctcgtccagcaacgctatattccagaaaacttgacttcactatcaatcgattgatccccagtgtagattttctgtgacacattttattggcgccacgaagatctgccgcatttttgcacctctcaaggaagcgctcactggccgcagtgcgaggtacagtactgcagggataaggaattaggtggacacctggccatggtcctcacgctgggagctggttgtagtttggaacagccgaaatagcgactgttccaccgactcgccgcgctgtttaaactcgcgaatatgaggctggaggaacggaataccgggatgctgattgtagcgctggcggtatgaaacgaaattgtggctcgggtctatgagaggcaggattttgggcggtatcaaatgggcaggagtaacagtacgactggcggcgaaatcacggaatatattagatccgatcgcaatatatttgcgaaggccgtctagtatagccattagagaataatagttccgtgcttcataaagctcctgtgagaaaacaaattaagcttcagtttcttggtatgttcaatagttggagtcctcaccaatgtacaggcctgaaggtacggaactaggtgtggcagtccagagcagcattccaacacagaattgcttagcctttgccaatagatgagggcctccgaaagcatagcatcctcttctatatgtgttcctcgtgacagcccatcaaataaacacttatccgtctgcgtcaaggcccctgcgaaatcggtcgctgatgaagaaaggcagtcttccaacaaaggaagagaagtttcgaagggctcgaaccaattcatctggtcagagtgtctgtatgctttctggaaacgtacagcaaggacactgagaaccttgaatatagttgataggctggaggaatggtttttgaacagttgctgaattggggctgcgatgaatgcaaatcctggggtatcatgcgaaggcatatcgtgcttgccctctggctgaatggccatgatacactgggaaaaggcgtgatgtgcaaacggacttcgagcccgaagatgctatgtgaaccaattagctagtttcccttgatcttggtctttctttgtgggcttaatggatcacccaccttctctattttcagataaagcaaaagttcctccgggtacatgcgtagatgatctacaagaagagcatataacgaagtatgctgctgcaagaaccactctactgacacggctttgtatccaagagcggagcgtacgatatcctcaaaagcgatctgctggaaatgaaaataactctctgcctcaatttctagagcgattgatctggggtccgatgaaccccctgatatagtgggaatccagttccatgtaagtaatggacgttgcgggatactagatcgaagcaggatctcttccactttctgcagatgtggcaactctgataggcggcaatgatcgtacggctttgacgccgcaaagaggcattcattgatgaactgcatattacgactcagcagtgagcttcgcggagaagattcgtcgtggaatagcccaaatcggatcgcttgactgatatcattgaaatcgtaagcccatagcatattgattgcctcatcttcccaccatcgatatgcgacgcaaaattgaggaatcgccacactaggacgaaagacaaacgggaatggccccatatccacgggaggagcgctgcttgttgggttttgcatcatttgagacaaagtcggcagcactgagttggtgatatcctggaggtgggggatatgtcggcagacccaggacagagagagttccatccatctatctaaattttaatttaccgctagtcaccttctgtgtaggagtggtctgtatcggaaataccgtcgacgaccacacttgggcctggttgtagcgttttgacaatatggcgagacgggagggggacggggagttagccaaggcaaagcccacgccccaaagttagctagcatgccgtgttgaaccaatattccaaatagttgccctcatatctggttcccattagcacattggggatggtatgaaatctgaaccatacccgattgggaatatcctccaagccagaattcctccgccccttgcgacctttgatttttctcaagcaccataattccttgcatctgggtttcacgtattataatagaagggaaactcaagattgttggataggtattttgcccgcagcatgtcgagatctaggaccgatacgctttgcccgccccacgaggggtgttatcaagtgacttgcaggcctatgtgaaaaccgaaaatttgtaccaactgtgtgcctgtatctaaattgacaagtgggtttagtccgcgcctaaggaatgtaggatttcatgtggagttgatagggttgtgttattcctggtgtagaccatggagatgctggtgagaaaaacatggatattagggggctcaacggttagttactaaaaccaacgaatgggaaaagcggcccacgtattattatgttgagattgtcaaggcattcatgttgttgagcattttgggtcccactgttattgttataaggcctcttaaagtgaatatcttgacaccatttggatcataaggtagcctgtatttccgcacattttggaagcatagccattacgtcattcaacatgtcagggaatcattcatacaaagtcaacgttagtggcacgctcatgggaaataatggctgatttctctgcgggcggtcgattttgagataccctctgttattgtaaaagctctggggcagtggctacttcatcaacccagggaagatcttcgaaggtatccgcaaacatgaacactagacctggaatgcactttctttgtcctggattgaatatcgctacccagggcttaatcttggctaacgtggtgatcaacgcgcatgcaaattacgatgttgaagtatatcaaagcagccctcagggtgctgatggtcagtttggttaatttagatctcacttcctctagcgagggccatgacatatgcctccatgtggatcattcaagcggttcttctttttctagcttttaaaacacgtagacttccgcgagcatcatcacagctagcgctaggccgcttcctcagccatactttcccaaagcaccggggctagaaatttacacagtcatgcgaacatctccttttgaaagacctcgtaatggcgctaagtgggctccatttggctcgtaattggatgcaagcaggggttggtatgtgaccttgtaatattgaaccttgggttatgcactagactggttgcgttggaaaagacatgttctgtaggcggagcgaatgttcgggccaaagattcgaggtcgatccgggcaacatcggaacatccggtttaggcaaaagccctcctatcggatatccactggccccttacgagattgtcccccgatgtctcacttgcgatgggcacatttaataccgcattacaagccagaaggaagaatctatttcctgcgaaagaacacagataacgccttcgaattctttcgacgtgaaggcagaatataaactacttcctactcgtcaggtgtgttgcgtggaattgctcacaggtaaccaaactcttggcctacttggggaatcaagactctaaccaaacttatgattgcgacagtatgtaccatgacggaaactcatccagtgggagctcaacctacccactcgtgggagtcccaatagactacccgtatggcctgacacccgctccgttgatggactcggctcctgcagtagaccaagcgagtgatgtttgttggagctttgagcaagcacaaaactggacgataacacgtgcgtcgccaacagtcacactgtctcccctccctatttcgagatatcgagagataagacctcgaccgctgcacgaatcagcgtccactttgcctccggtgcagcctggcaaagaagaacagcacagccagtaccggaaattggggagaagaaagcactcgaagagccacagacagtcagatcaaggatacctcaagaagacagccaggagcgcgattcgaacggcatctgaggttacggatacgaccaagaagcaagtgagagttggcagaatgaggtatgtacggctgcactctctaactggtaacccgggaaatggctaagtcgcctattacagcagagcgaaacccccgaaagctccagggggagattcagccacacaaggcccacgccgtcggtcgcctgattgctcttcaaatcatccggaggatagcccccaagcttcagtaggggctcttcagagagccttgaaggcccaggtattacaatcactcgaggttttgcgtgagatcgccaaggagttccgcgccttcaacttggggcttgagacgattgatgactgggtggcagagatcaaggaagttgacgaaacattgatccccgtcccatcaagcaccgcggtcttacaggtacatgttcctttcgaaaagctaagctttatcctcacgaaatgtattacagcttcaggacgcatgcgagactttattgtcagggaccaggcactggagttgttgaaatatatacagacctatgcggaggagtatcacctgtttaaaaacctgcgggtccatcttgacattggtaggtatatagaaagactcagccaaggcaaagataatgagatgggcaaatgatgttgttctcccgggaggtcgcgcatagtcttttgctgtataccagtcattttctgcctaatttgcttcaaaattgagaagatctctctggagtgttcattgcatgtcacatactgaagatgcttaatgccgttctgtcagtaatgaagactctaccgcagccattctgctgttccagaccttcccaccacctgccttttgatgtacaggatacatatcgcgcagtccaacaactctaggcccaggagcatgcttgtatataattgctccgtcgtggctgcccgcaatctttgggaatgcggaggccttcaaccttgctttcgcatcccaaatactaccatgccgatgaacatgagtatacttgttgctcggtttcgttgttcgtatggtagagggtctgttaagccggtccgattcgctcacgtaaataacctgctagaattccaagaccattagctcgaggctttcactttaggtacgcactgagagactcgacagactggtttcgttatgtcttcattggacaggttccacctcatctggcgctcggtatagggccctcttgtgcacgtttggcaattgggtagaaagacatctcgtcgtgtacagataataagtccggcaaagcttggagatatgtaagaaatggcaagcaagactcggggaataataggaagagaacgtgccttgagagttttcactcaccgtcaatcaagaaaattcttgatttcctcctccacagcaagccttgtatcaggattatatttgctggctgtacaggcaagtcgtagtagcctaaaaggatcccagaagttcctcgcttgcataggatgtggtccgtggacggcagatgctgaatggtgctttctgttagcatgtggactcttcaaaggaacaaaaggtctcgatctgttagggttgtgataagttgttgaatactccagggaatgcgaggaaggaaggtcggggaaaggagaaatgtatcactgactgtctgttttaggtaaggcagatttgggtcctctgccctccaccttaccctgacgcgagcacctgagtattctggccttccttgtctccttccaccaccagttccccctaattagataaaatccatgcccgtgttacaatttcactttctctcggtatccttcccggtaagtgcgaactcaccgaatcctccaaacctgtacctaccaagggtcttcgggctcaagcctgaaggctacccacctcgatcctttgctaccaaacgttcctaaggctgattcgaatcgcaatctagtattgtactaccctagttcgaacaatagcaatcttcagaccgaccagactcctgcctcccccatccatccttccgtcacacgaacgtcgcgcatgattgctcgactttgttcgaccaaactcctgtataaggctagtttcagcacacgatatcaacataccgttctttacttctccaccaccggtgcggattattgcgtgagctctaagggctagtctgaccaggtcagaagcgcagcgaccgcggcgtaacaactctcgagcatttttgctttaaggtgagacgtcggaacaagctgtcgcatactggacactggttccatctcttcttatcaaaagacagtccctaaatacccttggccgaatgctacactagtcaaacctgccaggtgcgtatggccgtttatgagatgtcctcgcagcaaacgaccgctagtaacgacttcacacagggagacaatagacgataaacgctttaaacttgtctggagcctagggataattcgtcttcatgttaggcaaaaattacagacagtcttagattgtgataagaggtgggaaattcatacattcagtttccggaacaagctcaaacaattgagcttatattaatcgccggagtaacatatatatagggcattcagacacgactaagcccatcctctgtcctcttactcaatccgggtcacctgctcgttttgcgtacttgcctgtcatttggcagtggtttctcgatgacacaacggagaaactggaagaccctaacatcggctgccttgcaaacgccctattttgccggattttccttccatgacttaacaactctgatacggcaagattattgatgatacgaaggatggtctacattgcatatcatgcagaaaccatgttttctttcaacaatctggataatctatgctttgctgatactaaagacaatgacagcggaatcatgccactggatatggaacaagaatacgttaatgattttgatgctgaccgggagatcttgggaggcggctcctaattttggtacatatctggtgtcctgcagtctgctttaaagtatattagagcaacacagagacagctgcatgaacctttgtttcccataaagactacttccgtttcccagaaaattctcttaagaatgtttctgtatccatccctccgtgaacacaaaaggttcgtccagtgttggaattatggaagaccatcgtatcatccatagaacctgcacatccggtaatcaccatgcttgcgccatcaaaagtgcagtctttgaagatatacgtcctttgctttcttttattgatatcggttggttcctcacgagggaagacggtggctgatgcaagtcaatacccgagtcatattctcaaatgacgcatcatagatacctgagtgtctctgttcatcagaactggaatgacgatgactggatagctttccttcgtgcttgaatggttgcttgagtggaaaggaagaagggttagtaaaagctgctgtaagagcgaaggcactctcgcccgagctttagtttcagacttacctgatcccgaatacacttcatggatgtcgacattggctttctggtatcatcctgatagctttggggctggggcttgtagatctgttagaaacagtaatctctggaaaaggaaagcctagcgcaagggtatgataccaattctattctctccagatgtggccgggtagacccattgagccatgtcgaagtatcatctgaatcggggttgccttgagataatgcaccttgacagccgcctttcaaccatctgatggtcatcttggaagttggggctttccagaaatatcgtaaagaccccctggaatgagacaatgaagtgaagtcagaatgtgagggggaacggatcagccatgacctagacggtaaattacccctagtaatgtctacgtactgtatggcttggcactccatgccctaaatgatggtaatatttctccgtaggtatccagcgttggcacatatgccatacggctggccgtggaaagaagtgcggatgtatcaggttgagggagggccctgggaagatcagccactaaggccttttttatggtagcggtataattcagaccttgaccccgacatcagctgcgcctacctcggaccaagtacagtatcatagtttggttcacctactcttgcgtccaatggaaatgagagcatgagaggaagagtagttagaggaccacgctagtacaatggcccgagagtgagaagaagcgccacaaccctttccccaaacccctcgataaacctactcccaggaaaaatgcgacgatcatttctattactacccaccataaatatattgttcattatgaaagaagaacctgaggtggtgttgtccccaaatacttggggaagctcccgggtccatcggaaaacctgcactctggatcaaatgggtacttgaaatcaggtcacattcggtcaggagactacagtaacacaagctcatgtgcctcaccacattacatttcggataacccccagtggtggacgacatattctcgaggcttgctatcaaaaatacgacttcatctacaaagacctccgtcagcaacctttttggcagcaccacacgcgccctcccgctttcctccaacttcgcccctccaatatcacgcgaaatgacctgcacccaataaatacggacccactgcggaaggcgccgaggagacactgcactgcaatataagtcttggaaacgtcgaataagtgaaatgtcctggaagagccaacggctaccacaagtgcgaggtggtgattcaaagtcggcccagctaggggcggtgtcaacatggtcttttcagctagatccgggagagaagggcagtatttccgagttgcttggtatgtactgtaattctgacacaacgaccataatatcagctccatccttcagcaaaatacggattccgacctcgtctttagcagtcaagaaccttcctttgccgcttgaccattcccaccttcaagcaacctcgcaagtccggcgatgaatcgcgcgctccaaatgggccactgatgctgttgaagcgcttttttccctttggccaacccatcgccacgacgtgcagtcctccttttatttgcacaataaccagttcacatgtacgagtgcggccctgagttagcggtacgtaaatttcaacagaggcagtttatatttgtttcgccgcacatgttgaaatagcccaagttctgtagtcactgagcattgtatagggttacccggtgaatggccttcgatccatgaaaggcaaggcctcaaggttcagagatggattttggatcataagcgccaccgtgtcgccgtcattgtccgaatgaggaacgacagctcgaacagctgcggtcacgacatagtttgtatgaatgatataacacgaatcgctcccgaggcccagggttctcctaccactaatagctgatattaatataaggatccccatcactgccatgctatagcaccatgcaaaatcgctggataccaattatagcaatacttttccaggtaaagtgatctatagacatgaaccattagatctattgccttctcacgttagatgaagttggatgcgtatacaatatgagtatgaacgctatatattattgaacgagaagtctttagctctgttgcctcctcataaaccaaccattcatggcccaacactaggaatcctgcccagaattttcatcatatttggaccaagagcgcattgtgttcaaatctttgagccattcttgcctgaggatcacgtgtttgtgccagataaacagctttttctcttccttggatattgtgcgggatggggacattgtttccttgcactaatgagcggaagaaaaatcttgcatatccgaaattgaaagctgcttttggttctgcgaatttgaactcttagatcgactatgttcctagaaaagggactcgtcactcactggtgagtaaactttgatcactgttggagggctgaacggtaaatcgcctgagggagaggtgaaaagcagcccacgcagtacgattaccagggcgttcaaatctgttcagaatgttgaggattttggggactcttattgtacggtctctgatgttccgtagacacgatttgcattagaaccatcataaaggtgcccggtatcgacgcacttttgtgcattctaccctctcgcatcattgattatctcagggctatatagccaacgcaaaattcttcatgcaatattgccgctccctgcacgctcatggccaactgtccaataaagttgcaagccgccccgcttatacatgctccttgagaaattgcccagctttagccggcagtatgttccaagaacgtgacaaacatctcctcctactttcgccggctcagcctttgccgcagcttgaccagcatgatggcccaagtctcccaaaggtcaacccgctgaccccacctgccactcctgtccctaattgggactcacgagtccttccaagctggcccgacgcgggtcacggcatatggatgcccaataaacgcgatactacatctctagaacgcgaataccgggtagaccatggggtaatccaggcctaccactgtttcccaggttctcattaccatgcaccaatgccgctaagggaccatggcatgcccagtctctgtctctctcaaaaaacagacggttcacttgagtcgacctccataccttacttgccaacattggtaccctgccacttgagacaaatcgactcatccccaatgtccaatgtagttgaacgtgcgccgggggctggttcctcgacaatgcaaactgtcaaccctgcgttggtatttccagcttcggcaactgcttctgagaccttggatattacatcaagtctccccgcggcccccgaagttgggcccataccctcgggtaccggtatcgtctctacttggattcttgaccagccacaagagaagtcccaggtactccatggcaccactatgtgtgtaaatgaccattcgcttcttgactgtcacgttaatagcaggcagcataatcacaacttgaaccttgagaaccagcaatctgatatgcacgagcggaggttcaaatgcaaaatcgttggctgcagaatgggcttcaagcgtgaggaccacctcgagcgtcacacaaggagtcacttgaaagaaaagccatatgtttgctgggtgcctggatgccaccgtaccttttcacgccgcgacaatctcaaagtccattgtacgaagacacatacgagacgcggtggtcgcaaccgttatgttgctaccctcgacgaggcgagccccgactacgatccagagttccgtggccagctgtcatttgatggacgcccactcaggttcttagctcctattagctctgttcctgaagctaagcctctgcaaccgtgaatttgggcgataataaacatcaaggacatattttgccgacaacaagtaggcgggactaggtggccaaagtaaaccaccgtcatccaagctcagctgcttacgatgcgactagggaagaacctgcggcgcaatgccctgtccccctgtcaacaatcaagtttctcgtccattgtttctgcctaccggagagctttgtcgtcaaacatgccgaatgtatacaactttaggaaacacaacgatagccccaatagtgcaaaggtggcacctaaataataccactgcccctgccattcctggattcgtcaatttgtagattatcttcgggcaaattactggtcaagggagtgcagctcgtttaaaactgtttgacaacatatccgaggctcgtcaataatcacacatagttgcaatctgctccgtactataaatcaaggtactcggttaaaattctgatactacgtttgactaggttgtcttccatgatttttcggccatggctgctatattacatgacacattcctccgctagcgacctctcacgagcatctttcgatatccatcagcatggccaaatcaccccgagaggattgattccagaccttgagcacgctgatcagcctttcttgagtctgctctaaagcttcttccaaggaaaccagacgagatagctgctcatcaggacgaagctggaaaccgtcccgctgtttgttcaatttagtggcagcttccttcggaggtctgtcattttcgtctggtatctcgctctcggagtgtttcggctcacatgaggcccatagacgtcggaagagtcccacgggtcgagccgcttggaaggcgagtttcgggtcatcgcgatcgagatctgccagtgtctccaatatgggttgaaaatgctcgatcgtcagaggtttctttaggatttcttcctgctgctgcgagagaatgtagtgattagccacagtatagaaagtgtcatcgcttagcttacaagtgggggttcggagtcggaaacggcctgcggataggcctcatcactctccctaggcatttcactcggctgacggtctgccctatcttggtccggtagttgttctgaggaatccatcctgttcacttgcaaaatctcagcgcccaaaaacatataattaccagctggcgctggtctctcttatagccttcccagaatcaaacagttagttcaacactgtgacaaaggtggctagctcgtccaacacaaccatgacccgacacatgacagagacctccttgaacatctattttcaacgttcggacttgatataaccgatttctttctttggtcgactttctatttttcattgtaccatctgctcaccattggacgaaacctgagggacaaagaaagaaaaaaaaaaaggaattcctccgcttattgtatggtgactgtagtgatattaagaaattctcgaggccattacctccccatagttttgcaactgttgaatatcaataacctccgaaagcttaccgctagtaaggggtattccggagatacgtaatcctttcccacagctcttcgcactatttcacccactcgtctactcagaaactgcctcttgcatttgggctgtaggctgtttcttggtgctgtggagtgtggtcgttgagtcaacgttagtgcatcaaccgtttacaataacgtcctttcttcaccgaatgtgtcgcttaagccagtggaaatataatccagacatatgtacaggcctcacatttgttagtcaccctcacaaatatgcttttacacttgacgcccactagaagcttgcaaatagcaagacaagcgggaaggtctataactacctcttttacctatgtttttgctcaagacaactgcatgactgatccgcagccagcagatattatatccaaggcgtcagaatgattttgtcccaagttgattaaccgcgggcatcttaatatagtgggaaggtgagaagatgaatattgtagaggttaaaaaaacgcggaacatatagtattaatcactggaatgtccgttatacattgtgctagtcgtgtctttgcaatctcgcatagtggagatagaccagaggaaacggcttgctcctgttgttttagggaagtacattactgaaggaagtaaaacaactgacaaaaagatgcacgctaacccatcttatataggtgacgtggaaagagaacgtccgcgattttgagacgttggtgttgtgatatgaggctggtgcagatcaggaagcaagccgcgccatcggaattagctccgaaatgtctatacagacaaacaagttgattgtaaatcaacttggctccgtgttgtatatataacctcatcttgccctctagaataaaacacgatttatacctctgaaccacaacagttggtccaccgcccgcctactcagatatccccacaacattccatatctcacatcaataatcaaatttcattcgtctctgcttgcggctaccgactaactctagcttgatgtaaatgtttagtgaaggcgggtaagagcagattccagcctgttctggaacgtgttgagcctcaacagctgcatgaagaaagcataccatgtgacttgaacatgtttgactaactagacgccgccttcggtaattttctgccggacccactttttgtggttggcattccctccaaccaccgcatcgtcactccgccaggatcgtctattatccaccaaggtctccccggacagccgggtggtctgctcaggaacagcatatgcagcgggcatggcagtcggtgtccgaccgggctcaaactctctttcaatattggagggttctgttggcgctgcgatcgtgtcggatgtgccattgatgaaagggtcaccgtccggccaccacttgcaggagggttctagatcaaggtcaatcaatcgccaatcaccactcgctctggaatggacgatgcggtgtactgctgcgcgtgtccatttgcttgcgcacactaatacctgttagcctggcaaaaccgaagtgcataaacgggagagcgctcatacccgaaaccgcggtcgttccgcctctaccatccattagacgtgccatctccttgccgatattgatgacatgaaaatggtatttcaggcgcgtgcaattgcggttgcggtaacgagtccggtccactggctgggtatctaggatatgtatagtgaattgcagaatctgctaccgagttagcccgacctattgtaggagcgatagcgagaagaaagatttactcacatcaaaaccccggtcatctcggtgtctatgctcgggacaatcgtttcggtcaaacatacggtcgagctcgaggatttgcgagatttcatcccccacccaatgggggtggtctattccggtaagcacaggacaccgcaaagcatccgagcataatgggggactcactgaaatgtttcagcctaacttgccacaggacttctagccttcgcacagtgtttctccggcttcggctttcttgaacgagatgtcgtatgaacggcaacgcgcggaagagtccaatgtcttcaagtacaaagacgatggtcccgtactggccaaggttaggtggatgcccatacggacccagcacgcataccggaaaatggatcgtcgagtacgtcgcatgatccgcggcttgtgcaatccttccagtcactcctggtcggggtcgggtcactatgcgtaatgtgcgagtggtctgtggtcctggcgcattctgcactgtgtccactgaagctacgtagaatgagggaagctgcaagaaagacctcacccctgagcgtggcatccagagctggacatactgccccggttgagcctcccaccccatgggaactgcaatatcaagccataaaagctggttgaaagaccgcgcgagtgcccgtctagaggtgatgcgccacgacctgtggtaccacatagtatgcagacatgtcccggcactccaggcacatccggcgcaaataccaccaagtaaaacccagcggtaggacgatacccggtcgatcaaatggtagaaaagggcgccggtggcgatcgaagcaagcatatagtggaccttgaggccgagttgcggccaccggcgaaggattgcagccaacgtccaaggcaagatcgagacgagactacatccggcctgttcattgttagccacttctagtcagacatactgcgtaggaatgggaaggctgccgtcctcagacccgcttcacgtaccagaagtgggatggcgagacgagctccgtggcttttatttcgagcatttgctcctaagacggacccatgaagaaggcaatgcagcacgcaaatgcgacctagccaccgatgggcccagtagaacgtgtcgcgttcgacatagtagacgtgggccggaagactgaagctaaacccggagcagaggggaacaaggtgtgtgaccgccaagcatccggctcgcctctgcacatccacccaggtctgagcatgaaggctgattacaatggtatttgcaattaccaaggctgtaagtactcccccttgcaagtatgttggtatatccagccactggagcacgcctggtgttggggcctggaagaaacttctccaggatacctgctgcaacctcaaaggcaaatgacggaatctgcgtccgaggctacaacatatccagcatacaagagcaaggagcccacatagaccgaatgtatcttggatggaagctctggcaagccactcggcaaactttgaaacagggcgtgacatgctttttaggacaggcaatactggacatcagcgggtttatatcttgttttctaaatggctgtttgaacaacgttgacctagagctttgattcaggcaggcgaaaatggcttgggagagcgatgcggcaaaaatgacactggtgagtaacgatcagaaacctcattttatgacttgggatggtgtggcaggttgatggctgaaatttatctttatcggcagcgtaacagtggtaatccgtctcatgtcgattgcaagacgtgcgtctcagaaaaaccacgttcggcgttgagccttaattctacggttcccatgttcctgcattatattacaattgtgagttcacatagttcgaacagttgaagttgatcaacattctgagaagcatctccacatggtgcatggtcgcttatataatagacggcgaccgtctttattagaaatatcgttgaggcaacctcgtgatacgctcttcaaactggtcacagttaggttagaagcgttccaggtcgtacttgccttacgctttctcaggcttccaacgtcaacgatctgtctctcaaccgtactgtttcctatcagggctttctacagagtaggtccgtttgaggtatcgaggaaagatgccaggtggagcgccgaataggtctattctcaagttttggtctatctgtgagagttgtcaagttataatcgagcaaagagtcacatatttatccacaaggtaaccacaagcaacaatgtatgattgaagacgaagaacccaactaggtacacgaataggcgtccttatatatccctgaattcttcctgtgtagatgagtagatagtagagtaatagatttgccttggcagattctactgatcaaccatctaccgttctaccacctgcatggtaacgtggtcggttgtcccaaagtggcagctgatggtactgtgatttccggcacaggtagtcgcatatgtatagaaaagcctctgctggtgggtgtcttagtcttgctcactgggcgtgatcatggtttctctttccctgaacatctggagttgccagactatagaatgttgcacgtgatcttctgagacatcaattggttggatcttggtggcccatcggtgtgggtgtgagtcacatctgattttggtgacgggtatgccaggaacacctcggccagcgacggcgaggaatgcgggaaatagtatacatacaagatagacccgctgttgactatcgtgttttcctggtttctcttctgctcttgggtacaagaattcttcaagtaaaacaaaaccgcgacactgttagacaatgtgaaactgtctcgtgaccctcaacctgtttgcggcaaacatgcgtttgagctgcatttcgaatcagcgtccaaagtagtctcaagtcgtcaaaggtacacacaacctcgcaaatccatattctatgactccttcggggtaaagtattgtactggtatagtgatattttgcgattacgtccggatccctctcgctaaatctagacctttgtgccgggatcactgatcctgtaagcctcaagagaccttgtaaccacgtaactgaatctctttggccccttccattatggactttcctcaggcgtgaactaactccagatgaggggagttggctaaagacctatcatccctggcattcctctggccctcctgtttcgaccacaagaaaagattgttgtcacaagttcgagattctaaaattcaattcccaattttggcaacgacaatgaatggcaagggaaaagaaaacaatcaaatcaaaccataaataccaacagctacgttgtgagccaccaaagccttctaacacgcatgccgactctaggagtgagtgatgggcttatgagaagaggtgacctgaacatgagaaacttcgaggagctcagtaaggatagccgctttctctctactcgacgtttcgagtctgaacgtgagctttgccctaacaagccaagattttccgctcattcgctccagcagatagtaaactgagtggttggtggaactatcagattcgcccgtggttatcttgaagtttgccgggtccactacggaatatatccagataaatccgttggagtgctcgaaagaagcggcactcgcgttccatttcgatatcagcgtgttgaataatggcccgaagattgtgactggaaggccaacacagacatatcccatctcgtcgagtctctctggacgcagagccttgagtatcaattctgcctcctcgatcgactttgaatcaataacaaccgagtctgatacccagaattcggttgaccagctactgaagtaaggtgggaccttctccaatacacaatcctggaagtgaaagaggcttgcccggaggccctttgcttgtttcctttttttcgtattggcaaggataatcttcaggtttcctgactgcgctgtctccagaattccgatctgatagttatgatgttccaggttagtcagctgtgcttgagggaagacttgaacaacactattctcgattgatatgaattcttctcggctgtctgctttgtttggtgggcggccttgcggaagcatggtggaagggagtctgatgttgatactctgaccacagagctttgactgttcccatttctaaacgagctcctcggtctttgaatatatgaaaggggcttttgtgaccgggtttttcgaggagaggcctacacgagagatatgctccctgctgcgttcagcatagttatacatggctattggaactcataatacgcacctattcgcacgccgccaatgcgacagaaacggatgttggagtagctgtaacatcaagtgcagtatcaaacaatctctcttaggaagagcttctggtagcaatccgggagtagcaatccaggggtactgattctcgtcgatgtgaatatgcagaaccagcgctaatttggtcgacttttggcaatgagatcaggttataaaactgtttcgggaggccttatatgggataacacccctcaaggaacaagtacaaagcaatttacccatggccagtcaagatcaatcgtttttctatcacaactttgatatgttcactggaacccaacggagtttccatttttaaaccctggtgaaaataataaaccgcaaacgttcacaaactatttaatatacgttagtatcgtgctggtcaaaagcctttcactcaacgttgagtaaaggctactgaaaataggtctttcatatggcgagagtcaaaatcgccgaggtgaacaggctcgaagatctagatcactttacctgatggacatgcagagaatttcgccattgggaggcttagttcaataagatttccatgacaatgtccgttgaaaccttaccaacttcgttgaaaatttactctgcttattaggagggtctgattatggctgaagcagaaagttacaaagctggcctgcttcagtgagatgcttctacactcagtttgcggttggatctcctaggatttgtaacttccttgcggataaagtggttgtttgactgggcggaagatgtagatgttgggactagcctgcctttgctagtggtagatccagaaacatgtaagcaatgagaagagacctactcagaactaacttccgagagttgatatacaaagcctaccggttatacgtactgtctcccgcgtatggcgatagggccaaatttggttggggaaaacactaaaatcataaggctttcggctaaaaagcgatgacattgcttcacacgcgttaatacagagacagcttactagctggcaaattaatgatgtgcacagcttgagtactatgtacgaatcatgtcttctctgccataccactcactgtggcctttcctgctcccaggaccgctataggaccaaatattgtataacaggactatcattctggtggataactcgtttggcaattgttcttatcggtattttgtggccaacctagggatgtcagctcatccattagaaacagtattcccatgcaacttacagggttagaaaagtcatcattatgtctgtggtggcagtgctgactatagtttgaagacttagaggatcggttcgagtagggtgattgatctctatccgacaccacgaatgcgcggtcttcacttgtttccgaaatatcttctttctctgagtgctcagagattgactcttgttcttcggattcactgggctcactgtacgaggatataatttcggaaagctcattttcttcttctatggccatcttaggtaggaaatgccggtgccagatgaatttacaacagaagatagacaaattttggattttcaattcaggtacgacccccatttatgtagcccgagggtcgattctaatatgccttgaacatgcctaaagagccatgcaaagttctaacgacaagcgaaagaatttagctagtgcttatgggtcaaattactaaaacgttgattcacctgaatacctaattgagccagtgatacgtcgggaatcgttgacgtcatcgactttcaccgcttaagatattcccccttcgtgtagcacaggctttatctatgacctgatgatcctgaagctagtgaggatatcaaaaattcaatagaacaatatatagtgatgctgtgagacatttttcaacgtttgcctactttgagacttaagaaccgctggtggttcagttacgggctatctgcattcttgaagacctttaaactcactatctcaaatccccttcggtggttcctcaatctggtcactgggattcatcgacttcaatactcagggcaaaaggacggacggattagtcaggaaaccacggtatataatttttgacgcgatgactgattcgtgggacgcagcggtcgccctaccataaaaagctggcaccagtctcgcttgctttggctgtgatcccatttattctggcggcgtcccccgctagctttatacccctcggcgcgatgtgttcgattgagactgccttatcatcctcgtcagtcccaatgtcgctgtcttcggtatgttatcaccgggagccagttaactgattctaacttaatttaccacttgaagctttttaatcgcccctcaggtatcgtaacgctggaagaccgacccagaagccccctagcaaaactcatacggtttgtaccgggccgctgagattgggtgctctacgactccgactaggagaaagaatttttatcgtggtggctggagaccgagtatggacaacagctgaccaaaaacggaaaatacaaattcagatggtcggctgagtctcgttccttaaaggtgtggaagcactttgactaggtggtagagcttagctctggccgacctaaggtagtttgtcggtcttgcctcacgccgcttaaccacccacatcatccatgtcataaatcctatggaacaagcacaatgggtaagcacttgaagtccaacttatgtcgcagaagcaaagaggaagtgtccgtttctgctgttaccctaggcccaattcaggagtctcgtgtaagcttctcgcccatgaggagcagatttactaaggcacagttcgaaggacaccttctgcggacaatcacgtccgcaaacctttcttttgaggtcacggaagaacccatattccgagaattgttggatctagtctattccggacctcaagctttggaggttccctcgttaaagaagctccgctattatatgcacgacatagtaactacctaccaagagttacagctgcaggacctgcccggagattccaaggtatcgattgctttgtgctgttggaaaggtccgtttgggcaggactttatggcgattactgcctattattttgataaagagtggagctaccgagaggtgctgcttgggttcgagctaatttgcaggtctgagacagggaatgacccctgtgatcaaatacttggactgatccaggaaaaagggttgctccatcggatattcagcgtgacagtcgactatagggtcgatgagaacctgatgctgttattaagagagaagctcacttcttctggtggtatcagctcttggcagtgctttgttggggttcctggtatagtacagaccatttagctctgccttcggcggtatatcgagaatatcacaagctccccagaaggggaaagggttgagaatgtgcgagaaatatcacacgccaatggttggaccgacctatcagatggcgacgaaatatcatatgttttgggaaaggtgaatgccctctatcctcttgactaaaaaacaaaatctgacccttgcctttcgcagattcgattatttgcaaaatttgtcaacgagacccctaggaagcgcgatgagtttttgtgtctctagcctgcatcgactcgagtcttgccgttagacgatgcgaggtcccgatggaattcggtattcctgatgttaaaacgagccggtagactgcgaagatatatcgactaatactgccaggagagtgggaatttacaatataaattaacaaatacggattggcgtaaggtcgactaccttgtgcaactgataatgccattcatccagtttactacggccctcctggcgtcgagagaggcgacagtctacagggtctgtttcgtgtttaagatactaatggagcatctcgacgagtcaacccgaatattgagaagaaaatcagcaccgtggaagcgcaaactatctgaggcgtcgcttatcatgaagatggaacttggagaagtatacgaaaagacatttcaaaactttggggttatgtatggccctggaactttcgttgctccccaatataaggtgtccgcattcgatgaggccacattatcgcaaggtttgggccaacccgagcgctacatcgagtatctgaggatctttcacctacaataccgaccgcaaatgcccacgagcttgtcttgcgtgaacggactgtcttgttccccgcaattgttggggcttgaccggcttctgtacccactagctggtctggcgggtagctcaaggtgtgcgcaagatgaagttgattaatatctccgcgaaggtctgaacaactgcccaatatttcctgttgactactgacacgtaataggggttctcaatatctcgctatgcgcttactggaaagaccatcaacgcgaatggcctgttctcactcgactggcgcgcgatctactctccattccggctataggagctggcacagaacggcttctcaccgttgcacaaaatatctgccgtacttgtggaggatctctggacgagtcgaccatgcgagatttggtgatgtacgcgtactcggagggatccgaatcagggaagcaatcgatcagccgggtgtaacgtgacatggcgagtgacgatgaatgggaggagttcgaagtagaggcagaaaggcctgaaccgatcagcgatgacgagtgggattcagccgagatgagtgttgacgagcgctctggggacgacgaaaacagctaggcagaggcagtgatactggagatcccacctacaggagacctggagtaggatgtaacggataaaggcgaggggggctcattcctgcctccgcctgtcacgcagctcatcaatagccttcgaagaagattctccggcagatgacagtgatctagcagggtgtgtcatcattcttatccagcatttgtttgctagaatccggcctagccctacctatccgcagtataaattcattgtcgttgatttgcaataaatcgttccaacgaagaatgcatcatattaatagattctgtggaaagcgcgtatataggacagtcaatgttacaattctcacctttggaactgccagtcttgttgcagcggtcataaaaatgtggttgcgacgagcggacgccctgcagcttgtaggtagtcagtgattacttgtaactctttctgtgttcacaactatctttatttgcttttaccatcatgtctgctagatatagagttggcagaattcgatcatcagattgaccctcacaggaaccctagcccaggaggcacttgattctaggtccttggcagtaacgagggctgggccccagccggcacatcaatcaaacttccaaaccaaataattgaggcgcaatatccattttgcccttcgtcgccatcctgccactggttattcgagggatcttgtcgttcctgcttcttctatgtggtttacaggcgtagcagaattccagtcattcaaaaggcagctgagatgaagaaacattggaattgacccgcgatatgtggcgggtgattaatgcagagggctctttccaagataaagtaccaggggatccaacatgatcagtttgattcggttgtgacaggaatcaaggtatggcgagcgtactggtaagatctacaatggtaaaattatctgactaaaaacaaaaatggtctgaatttaacaatctggtcagacataataattaaggaaaacacattgtagaaatgtcgcatgattcagtggcaaagacggtaattccaaaataacatctggtttcttgacacatagatttagtcaaaatttcgccaaaaaaaagaaaaaagaaaagcaaaagcaaaagaatcaagtctataacatctttaacgcggggattgatttccagctccttcactttcgcctcaaagttcttcctcaacctccacatcacccttgttcagcctctcctccttgtagtgatcgtaatttgccaaggctattctgtatctcttttctctctcggcttcgctcatggcgttccacttctccatcttttccacacttgccatgtaatcttgaacattaaattttttaggcgcctggttcttgcttagactgctcccactgctttcgacttcgacaacattcgatccaggagcgtcctaagtggcggaacgggacgggacaacagtacttgtctcctgctcttgctcttgtttgataccattagccatattgtctcctaagatgctagatcggctctttagggtcgatgaaaaagaccctaattgagccggtgtgcgagatctttctggcttgattttctccgcctcgaaggtatctaaagggaatggcaaatgtgaaaccagtttaccctccttttgtatcgccttaatgtacagagtctcctgcaagtcctagattgcgcggattccagtgctggccaccttcctgcccgacaaccgaatcacatccgtccgaggggtctagctgcattcgtcgactaataagtaccggtgcttttccttgatatccttccattcgacattgatccatatctgtggacacttaaggttgctctccgttttatcaatggcgatgcctctaaacccggcaatatttcttttcgtatattgccaatgtcgatccccgtttggcgcgttgtatctgagcagggaaatccgattgtgggacagattttcgaaaccttcggtactatacgcccttgttcttcgaaacacgtgcctgggggcctgggcgggaccaacccgaaaaatgaagaaccgacttttccctgtgccgccaaacccggctatgtcgcctggttggggatcttcgtggcgtcctttcttttcacgacggcattcatttatgttcaacttctcgaagtccacaaatagttgcgggccgacgcttgaatcattcattccacgtgtttgtgctcccgccgtgccatcagaggtcgactcgtcggtgagtttaggttcagcatccgacatttcctcgtccctcaccggggtctcatctgcaggccctgtttcatcgtgtgggtctccagaaatatcagaacgttgacttgagtttggttgatctggctgccccctgtcggcgggtggtcggtcatccacgggccccggtgcagcagcaccatgtttcccatcacttggaccctcttcattggagttttcctctttttttgcttctccaaggagattttccagcgtttcctggcgatgtctgggcgtcttgcgatcattattgggcgttttcttcacgccggcattggagaccataatgtggatcttctatgaggtcttttgtgaaaatttagcaagatgcaaattattcatgtttttacagaaatacatcgagatatttataagccgaaatcacagcggagtccaactatgttcccccgctgaaggaggtattctgcggcttgctccaagtgcctcaatatttttgggcttttttaggacttttttatgacatcacgagcctccttattctttggcgttgacacttgttttcaaaatggtagaattttgagtccagaagttgtgttccaggtttccgtagccaccgaaacctgaggcggcgttgacaacacaagaggcgaaagaaatcaaacctgcctacagtagttgaaggccagaggattgtttaattatcgcttcgccgtagatattgtgtactcttcaaagccggcacaaatatggacctaaacctggggctgaaagtcgaaatttgactgtttgctggtgctgctggatgatcatggatgccccagaatattttgacgttgacgtctctacatctgcaataattgagacatcaccataattcagcctgcggctggagcagtatttccaaattaatgctcatgctcgtgtggctcaatagagaagattggtaaagactgacgatctgctctgtgtaaatatccaccaaccttggttttacaacgacaacaaaagctgtccctggaaacaggcgagccacccaggaatcacatagggacaccgggaaccatacgtagcttgtaaggctactcattttcgctttcggggattcagtcatgtttctgggaacggctctgtgagtttggacgttcagaacttcattcgtatcaattctaagcttactccaagctctaaatcacggctatgctctctcttgctgatccctatgccgagtgcctggtcacgcgtatccacgcgtgattgacagtcccttcgctaatttctcactctcgtcacaccgcggtatactaagatcatagataacacagcacaaaaagttacatctctacgagcgaagcgggttgaaaaacccaaagagcggctggttttgatattcgaggcaattcgacttacgaagaatgctattgttccatcgttccaattccaattttcctggtacatacctgcactttctgacttccttgatcgctattgcagtgattggggattaaaggtgcagctggcttatatgtatatttatttttgcttgccgggtggtctcctcacccttcaggaaatcgttcaacacttctccgcacccgaaggttctttttcatggactgatagaattggagcttagcacgtttttaaatattgatccttggttacaaaactatacatactcgttcatttccaatgtgccagttattctataaaaagatagccaataaggtaataagaacgagtagcctctcactcgtacagctcctcctcatccgcaacagcacgcttgggcacttctcttctggctgtttcggtgagaaagtactctccggacgcggtgtccgattctatttcttcccacgcaatggtatcttcgtacctgctctgtagcaattgcgtggcgagctgcatcgtgacccaatccctggatggatggtgtcggagatcaaggtgcggtcggatagcgtttgtagatattgtattatatcgataatcaatttcctactaattgttgtgagggttgggggtctctttcgatacatgtttcagtcacattcttggggatgactctatctagggactcacatcctggccctaggagctatcttgttcctgggggcattggtgcgattcctgagagcacagatgcagcttctaggggtcggataggccccaggaaacccgacgtggcttctggggtcttgtacttccggctcagggaaccaaagtggtgttcctgttgactgcctcattaactcctggagcgtcaattgcggttcctagggctttatctcaaccttcggtaagagctctggtccgtgtatttcccagcggatacatagctcctacaagcgcttcgacgtttccagtgtcaatgcacctattgtcatagtcaaattcccaaggaagaaaatttgtcgaggcacccgaccacaagttttgatttttctgccaacaatcttggtcttcactcaacattggtccattgagctaaaaccgatgtctatattcttttggcctccttcattaggtatgacgaaaaggagaactcttatatactacactatttagagctatgaacctaaaatcaatcgaaattgcaaagcttttggggtgcactgacatctagtactttgaaagaggggcagtcgcgtggtgttctgatggtataaatatcagtatttcacatttggccgctaagcttgctctaaaacttcatatgaacggctacgctctctgttgctggtccgaatgcggagtgtctggtcacgtgtattcacggtgattgacagtcgcttcgctaatttcccatttcttcacgcgttgtctgtaaattgtaatcccccacgctgagtggaagtcagccgtgccgaccagcgaagcggtgcagaggtagaagggtctggcggtagatgagcccctgataatctggctgacgacggggcccaccagtgggagatggttcgcccccgccgtgtggacggaatgtgagtggctagcaagcgatagcgatatccttctacagctctgcaatgtgcaagcttcagtattgtgggagcgcaagcgagctcttgtaacggtgttgtgtcggccttgggagggagcgatcttcaagccgccgaggagcctgagggttggtaaagtctccatgtggtagagcgtttatgggcagaaagaatgattggattttccgctatatattcgtgtcatctcctaaggattagcgttaatattagataaggtccatactgctggtgaactttcgtcgggttggtgacggggacgaacggtgcacggctgttgattcattcaacccattcgacaacttagcatatggctgtaaattcccctagtttgtcctgattctttgtaataagggagaatagaataacttctcggcctccacctttccatccctcccagcccacgttaaatctttatacacttgggtatttcgtcttataacagaaatgaacgaactgaacaacaatggtctgtacccattgccttgataatatcttgcgctaacattactcgtctacgatttgcttcacgctatctggaatgaatcttttggcataccgacacctcctccttgtctcgctactgaccccaatgatctgtggcaggattttcttggcaaagacgatcctgcagaatacgaaactcaagggtcttcctttatcgaatgccttttctaccctgatctcgacagtctgtccgggttcaagtggacaggtccagatcctctgaccaactctactcgggctagcgacattttcctccacatgtcagcgctccttttccctaaagaggtgcactggatcgaatttcgatttgttcccatttgaccgagtatctgatgagactataggagaggatctgttctccctgccgcgggttgaaacggccatggcgaatctctatcggatacgcagacagctactagacacaatcacctggcatgctgtccgtgcaacaggcactagcttccgactgtccctttggcctcgtacggaatctctaccgtactcgagtctctcgacacattctctgttaactaggcttcccccgacgctatccctggacccacggtttttcgtacataatatatcgagtaattacgtgtgagattgatctgaatcaagcggggttgttcgtatactcatttcagtaaagaccacaataatgaataatgactatttgatgcccttcttgataaaaagcctcggaaatatataacctactttacatacagtgtgattccccttgcaatgcgtcgccgcttgtagtatttctacgtcgccaatataggacggggcagcccggaataggcaattcattactcttctcttataacgtctaacaaccctaccaaattgggactgtaggggtagttccagttatcgagtaggctgatcagtcgttcccgagatgattccaatgcctgtccgaaaaagcgcagtcgagctagctgcttatcgtggcgaagctgaagtccgtccctctcttttctcaggtatgtaccagcctccttcaagttctgattgctctgctctagcttctggccattaatatgcttagacacacacgactcccataggcgtcgatagggtccaataagtcgagctactagaaaggcaaatttgggatcgtcgcattcgaggtctgctagtaccttcaaggtgggttgaaacggctcggtcgccaaggtatgtcttgtttcttcttcgtgttgcgaaggggaagtctacgatggtcagccaaagcatctgaagccaaatggtgtcacttaccaatagagggacgtgatcagaaggttccacatcactgtccttattactaaggtttggtaattcacagggccgctattctcctttttcctggtctagcgagctgttcgaggcatcaatttttcccaggagaaagtcaaggtctgggcgatactagttccatcaggccttggtataatcttatagactatgagacgcagacagacggctatagactgagttttacgatccccacatcagtcaatcaacgcagtcagcttagaatttgcttttattttcagcgggcgcttggtagtaaatttgagaggaggagtatcaacgggttggccgggaaaactgatcaagcctgacgatgttaagggccagatatggacgcccattgacgtgagagatatctcaactagacgcctcttccactttcgttggaagcctgggaaacccggcaaacagcattgcagaataggtagttcggatagtaacgaagggaaaaatagaaaagaaaaaaaaaaaaaaaaaacaatttatcttcgaagtttgatggttatcactcaaattgagcgttgataacgtttggctaagcttcaacgggttgacgggtcatgctaccgtgacctcgctttctgcagtctaggcggacagacccacagctcaccacagaccaacataacactaaaacgaggctagaaacaaaggtacatgattcctagggatagaattgtaggagttttcggtgatccaacgttgagtcgctaatatatgaggtgactaggataagaaatatgtgaatacgtgcctgttattgcggattgaatatctcctacaaagcctcctttaagagggatgtgaaggatttaacagttagctaacgttacttgaccgactcagcgtccctttctctcagtactactcttactcgcctctctcgctaggcatctaaaggtattaagaatgtcgctgcaaatagttgcggtaaaagaagacgtaggtttcaacaggcctcaattaagaaatgtgtccttcaacacttctaaccaggtcggtaagtgacagaagccgaaaagcctataaatacgtcctctacccctacaatcgctctactatttattcacttgattctgtaaagtcgagcaggcttgtgtctgatgtactcgataagttctccctttgatcgagtactagaatttatactgtgctaacatttatagtatatattgtggaccagtaaaccagatagttcctatactgtaagagacgtggttctaagcattcactgccccatttacgctagccgataggagatatgggatttggattagctggtcaaggtatctatgcgaagaggtctctgctatagcgagctgatctactgtcgcggctctggttgaccatagatttgaagtgtaactgctcacactgtaggtatataggcttacaaatctttgaaactgtactgacctgaaagacgcgggacagccagatctatggacgttcgaacacaatgcactagagtaagggccactctttatccctggtcttaactatcagaaaatgtgagttatggaattccacgctggtttactggctaataattgacagtgaacctttaggagcttaccagagtggccctgataaccctgtactaccgtcagtgcaaagccatggcttacacactattcctagccccgtcgcttcgaataatgcagtatgtcctaggtggaagatcgtaaactaagatagcgagttaacaatagggtgcggaaatttaagtgcaagctttagtcgtatcgaagcttgaggcgtccgtccttcctgatagtgagttatcgcgtcttctgctgcgccggtccggttgaatatgctaagccttatgcctaaaatcacgataccactgataccttcacgctattataggagcactctatcattgagggtgaaatatactgtggcgagtggcctaattccgctagatcgaggataagaccaaggtggcggccgacaagcgtgctctatcgcgtcttccgccctcgtccctaccgccttcgcactgttgtggagttcctgaacctctggcatcgcgacacattcatctactatggaagtgcaatgtttatcgcgggtgggttcgtaacgcgtttactgtcttaacaaattgtcttgtgtaccctagcgcggcttttttgaagcgagtgcagattgcgataagcttgaatgcgacgtggcatggctggtgactacattgcagagagttgtaagtgatctagttgtgaagccgatatgaccattgtgcaaactgatcgttacgtctcaagcgtactttgggatttctatgaacaggtacgctacggcaactcgtctaactagattagcccttactgactcggatcgtacaacaggagaacaccctcatttctgtcacttaagtcgaataccacgcgaacaaatgtcttatctactcgagctcccctatataaatactgtcgcatgctctccatcccttctatatgactactatcgacaatgagtcacagaaggttcatatcgcgtacctcggcctctttctccctattgattctgtatatcgggtcattgttcgatttgtctacatgatataactcctaaactccgatcagcctatactactacccaaatcatacctatggctaagtatacaacctttcaaatacctttaagtggcgtaggctgctggtatcgaatgcgtgatcctcgttatcttcggatggcatttggtatctttccagaactagaaaaacgcacaggaatgttgatgttttatcttacttcctggcagataggcgtacctctgtagacaatcaggctgttagcacaagtccacctacaaggggaaggagaggcaaagtctccttattcttagcctataatttgacattggttatctcaggtataaacccagagggtaagatcggggcacacgcaagccaatgagagctcactacctaagaatcacctcgggcatacaggaagctgtatcataagggctgtcaaaagtattgtggtatacccggttggttcttatacacacatttcctatctaaaccgaagcactatctacaaagaccatttacccctaggtatcactgcagctgtaggttagtcaagtcgaccgcgcgtatcctttatccgttcatatcgtctcctaacatatcacgcacttgttaggaaatccggattccctacatccctatttcgatggtttttttgagaataaatcatatattcgtcgagcccgccgcgctgcggaggatacgtaggcatgttactgttcggctaggcggccactgtaaagactttggtgtccgaaacaatatcgaatcagaatgtttataggacctcttagactagcccctagatcctggagcaaactttccgccgtcaatcaacgcttatatagtggttgcttttggaagtatggccggattatctactacgactacgagcgaactagcactcctgcggggatatcacctaacggaaattcgtttcagacggcactgcttgaacccaatcgggtttcaattaggtttcaaccgtgtttcaaccgtgttcccttatcagcagaatatggttgattacattaacttaggacaccgcttcctaaaaggcaattgccgtcacttcgatccgggattggttaaaatatgatccgtcgttgccgaggtatagtaggagccaaccgggtattcttgattgcttacttatccaaatctctcagcaacatggttgtctctgcggtaaaattactttgattcttacgctctctaggatataagagctgaaatagggtaaggtcgagtgactcaattgccgcctcaagtgatggctttgacttcgcaaggcacaaagcctaccgtatggctaattttactcaagccattcgttcggcacctcatcacatgcttctacacgtgggtcttgggcgtattgcttgatcatagttgaaccagtggatctactgtcctatcggactgaggctgtatgcccactttaccgagtgatcagaatgggactagaaatggcttgcgaaatagaatcgacagtgattgatacatttatcatgtgggtgagatggcaagaaaatctccgtattacgtccgtgtgacattgatagacctcgctactgcctataaggcccatagatttgcactgagttactaccccctgcctataggcgggcgggcggttgaccgaagccccgtgtcatataatatgtccataggttgcttactaataagcactttggtcactgaaatttcataattttacaatgtttagccacatatgtatatatcctatagtactacgtattcaggttatttaagtagaaaaggatacaatggatgtgtccagctataaccaaccctagtaaaatcaatggaatatcgagtctaagtgaaattgaaagtatggtccgaaatgtatagaaattgtgatacgtctgcattgtgtataaatatatacatgaccacaaaacatgctgaacctacaaaaccacttacaatataatgcctaccagtcgcacaatataatgcctaccagcgcatcagtaaatttattattaacacgacatactagttatactacatactaggattcgcctttattatgatcaattatctgctatactagtggttattgtcacatgcttctacatgtgggtcttaggcgtattgcttggttatagttgaaccagtagatctactatcactatcggattgaggctgtatgtcaacttcaccgagtgatcagagtgggactagaattttcgcttacgagatagaatctatagtgattgatacatttatccatatgggtgagatggcatgaaaatctccgtactacatcggtgagacattgatagacctcgccatgggccatgaggcccatggattataggcgggcgggcggttgaccgtagccccgtgtcatttaatgggcctatgtgttgcttactaataagcacttcagtcacatgaaattttataattttataatgtttagccacgcacgtatatgtcctatagtagtccgtattcaggttatttgagtagaaaagtatacaatggagatgctcagctataacaaatcctagtaaaagcaatggactattgagtctaagtgaatgaaagtgtgatccgaaatgcatagaaattgtgatgcgtctgcattgcgcgtaaatatatacatgactacaaaacatgctgaacctacaaaaccactcacaatataatgcctaccagcgcatcagtaaatttattataaacacgacatactagttatactacatactaggattcgcctttattatgatcaattatctgctatactagtggttattgggggtaggtgacaagtgatagatttccaaaagttgaaccccctattcaggaaacttacataatctgagggtggcatggaccgatggcaaggcctagacgttgaccacctttttcaccgcccgaccattcaccaccacgctcatcactacgttcatcaccacaaacacacacatcaactcacacatcaacacaaatcaccactcacatcaccacacacatccatacgggaggcaccctgtcggcagtatgggctattggaaataatgccatttgcaaagttcatcattggagccccgataccacctcagaaagcgaaaccatcaaattcgttcaaaaaatggcaccccaggtacagtacgtcccgaaactggtgcaaccgcctacatttcgattgttccacaaatcctagttgccaagacacgctagtctatatcaagagtttttccggagtatccttgtcagcggggtacgtattatttggtgcgaatagtaacacggttcaacgcaacaagcattgcaagacgacactcatctctgtttgcctacatctgaatgaaagatgccaatttctattgtagcgaggaagctattggatcacaagctacttcagagtcaagtctcgacctgctttcaaaaacttgcgttcagtatggtgaaccactttttcgactgttgaaaagacagtgatactgcaaggatatgattctcacatatcattgaatttgcaattaaaccgctcaacgctatggcagactgactactctagccgttttgaccatggccactagccacggtcaccgtctctttcataaggattgaagtgcttcaacagatgccgcaataatgggttggaggctttgtgtacccgtggttggccataagacgtgcctcccattgatccctctacaatcccttttgcctagcctcgcgctaacggtactttctgcgttgctcgcaaccaactgatgttgcctccgctaatacttctgctacctgtcggtacagatactatgaatatactcccaaatccagggtattggttgttttccttgacggagaataaaaagtctagaccttattggaaagcccagaatagaaacccgactccagtttccaggacaatgaagtgagttatttcagctcccatggctcacgagctaggttttcgtgatcgccaccccctcgcaagattgcaacgctactatcacagtcatgagaccctggagaagaatagcacccgacgggccaatcaaacaccacgcgcgaatctagacagacgcaggtagggttccgcgatgcagatctcagcaacgacccacggaacagtagatcaatgaggttctatttgtggagagaaaatggaaacaattgcaaaggtctaggcacgatccacaagctcaaacttttcggccatcagtgtacgatggaacgggggattgttgcctaggtactgctggggcaggtgagtatttggaataacacgcaggctttggcgacagaatggtaggctacaatccgatccgtggttgtgttcacttggtcgtagtcattagaaagtaagtacccctgtcaagtgggaagcagaactttacctctctggtcagtagaacgttctagaagctatatatcttctcctgcaccaagctttccggtgatgattatactatactctcttcgagccagacaagtcctctccatacgctcaattctatcgccagtctagtaactctagtagatggcttatagaaataatgccagtggatcacatgagcttacgtaaatatctccagtttttgaactaaacccggaaaaccgattggttcccgggagtgggttctgtggaccggcccacctacagcacctaacctgtattccaagcaccctgcctatctcgagaatgacactgaatgcagtatcttctaataaaatattgtcctttcctaatatcctatatatgagcagaatgagaatttgttgatcctactccggatctcgtttttttgggctagcaatctataaagtaagtgtagcagaggctgtttagataagctttctatgaggatcattcgtgacagccgcatcctcccgcatcctctcaccgagggagtatttctatggcttatcgaactttattttccggggttcggcgatcgatcgacgatcccggctatgttctacgatctctggggaactaacttttgtcaaactataacctctgtactcccttactattatcgtaattctaaggaatggtgcttgtttatattttaataatatgtatatttatacatataacaatcatacagtagcttgattgctcagctgccatgtttgccattttccccgtttgtagcacatcaaacaacactaattcgttaaggtagttgctattgctacttcaagatcgcgatatagcgcagatactaacaaactgctggtagtatagatattccgctcatcagtatctcagcttcctagctgcacagacacgatgtatatagttccaaatctacgatgacgatcgtgattcttcacactataaagggcggagtaatggtatcgcgcggcctatgatatatgattagcttgtggttaaagggtggtaaacattagtttatacctggtctcgaacctttcctcttcattgattcaatgctgtcgatctagctagtcttagtggttaggattgtttaaatccatttttcaatattactttgcgtaggccttctgcttatgagattcgctaatgaagccttatagccggccgagcgataagctcctgctcggcttcgatggcttagatggcctggatgcttaagcggtctggtactaatacaacgttgcttgcgcagaatatagtacttttttccttgcagagactcagcgcttcagtctatctgatattgttcagaatatgcgtgggagcgggctttccacggcagcgcccgatgagcgtccagctaggcgagaaggttcttttcctcctattcctcccaggctacctcgcttcgaggggacatatcgcatgaactagtagtaaccagaatagaccttttcggacaatagcacgacttgagctcctgatagaagggaaaagtgaacctaaatcctctccacgtcctagtaaaaagataagtacccttggcccactgcaaatcttctaaaggttcaataacattacacatagaccattctgggggtcagttcggtgagtctgaattgtgaattattgattccgtattccaggctccctcaaaccgtcggtgttgaaataatccctagctataagaacacctaactgtcaatttcatactccttgaaattgttcttgaatgtaattactttacattaaaatgaacaaagcactgaattcccagactaagccctaccgggtactgaataatgtaaccctaaacagactttagaggcaaaacttggcttcgtacaaagttcgttcccctaaagtttaatgaattttatgactgattggttgaaatgtattccaaattaagcgataattgtggtaattacggatataagatagtgggccttgcaaaccctgatcgcaacctctggtttagagaacgacctcttcatattagcctgtgcgacttctcttgtaacatctggctgggagaattcattatctcaccttaacacagatctaactatagggagaatccggaaaatcccgttcactgatcaacgataaagctttcggagccaattataacatgcactgtccctatcatcctctgggtccgaggatatctagagtccgccaggatcagcggaaggcgataccacagaggaagagtcttctttacaggagaatggctcctttagtaaccaccaaaacgacattacagtggaggatggccaggaaagtcctctacactcctagagtataggcccgagaccagaagaaggattggaacaacccggataggctaatctcgcggaggactgtaatatgatcgccttacaatgtaccgcagagtgagtacgaatttgccccctataataatgttttgtgatacgtctgcttacaacattcagcctagatatccaaacgaagttagttatacgactcaccagagaacgaacgaaggctgactttcctaggctcatacaaaaagcattggataactctaacagctggattgcaactattcgcagtgacttagaggacatccgcagtcggttggcggtcgtagagacagctatagagatgatggccaaagaggggaagaatagtactacagaggataatgcaactaggcgaatacttcggtcgcagtagtaatctggatcgaaatatgatatggttgtagaatatatcccagagcctattgtcagccttattagctgaggtatcaccatcgcattgtacttcgcgaccaaccatatctcactggggcagactggaagctgtaaataaccgtaaggctacagaaagtagacaaatatttactataattgcgctgtaacgaactgagctccttggaacgaattctctgactccgccagtaacagttgtaaaccgattcgtgctattaaggtttctcgagcgcccgggtatcatttttatcggctaccctctccctggcccactagaccctcacgtccacattcagtggtagatcaatttgagatataaattggctgtcgtacgcttggtagagtattccaaatcttatattatgacccacggttagcccgctcaattgggtttcggccactttaggcggaccagaaaaatactgtagtttgtgccagcgtcgtaggctgtcgcttaaaatcctattatctgccaagtggcaagaaaagtatatgtgaaccaagcgccaaggaaacagccaaatttctttatgaatatcgccgagtcatattgcctatcaaatgctagggggagaccacggatatgattagttagattcggttgcttccgacagatcagcgtatcatctctccgggctgtgggccctaccgctaaccacatttagcgattatggaacattctctctgccctccaagctgcgcttggtagagcgagttaaatcgtcagaggatctacgtcaatatccttctatggcagaacaccgatcgatataatctttgttttctatatttactgttatcatgggacggtagtggcgttactgaagattatcttatgaactatccacctgctagtgcttgtataaactgactagctggttcctctatagtaaagctaggaccgctggacacgctaaatttgctatgctttatacaggtgattagtattggttgcttgaaactggcgcctcctgatttataagggtataattacccagagcggaaaactgaggcagggtattatgacctagagtcccaagcgggccgtcctgctcgggctaacttccgttaatgcctcccgagctaggtaagtaggatgccagtctatggttctggagggtatcgatcgtgttctagaaccgagtagtcgccgatactagctcgccatacgtttgatgtaagaccggctgaatatcgtgccatgagactaggccctgtatggtggcgtgagatgactcctacgcctgctgcagttgacagagctctcttttaagcctctggttctctcctaaggctttgtctcttgctgtgatagcctcctgtagtttcgaggtatcctgggctttttcagtatgcaaacgctgtatcgactgggaatcatgggctctttcttcgtctatctccttaagagccagctggacctccttttggatctggtccatcatatctaggcactttcggtgggtcgcttcatggtctttctttcgggtgcttttcgctgtagaatgcccctaaaagctagcgttagcaaggtgtagttataaacgactgataggataaagtaaaagaatataacgaagctggagtaagtgaaggaaaaatagagattaacataccagccctttgtgattccctaccgccttgagagggttacgttccgccttagacctagaggctgtggaccgagcagaataaggcgaaggggcatatgccctgccagtcccgggtttcgttgtggcagtaccgcggtctgcatctccccgagagggcttttggtcctttgccatgctgaatccttccgtctggtgaatgattgcaggtttagaaagacactgggcaaagcgaagaaatgattgatcgcagtggccttcggggagtctcgactttaaaagtttaggtggagacaatcaaaagccctgaaacaaggtgaacgcgtgacctcccccctgccaagcagctgtgtcggcatcagcatcatgagcctgaaagccaagtacccattgacacacaggggccccacggtgcgctagcgcaaaagcacaagatctgcgattttattgtgaagaaagtgatcgaccgccgcgcaccgggatctacgttgaggtatacggttgtgcctcagtattgaccagagccgaaccatccgagccgctcttggaaacaagaagggctctctggcctcagccatgtgtggtgtagttgtaccattgtcctagatgtaacttccactatatacactgtcccgctattgcaacaatttcggaaagttgggccctaaagacttccatttcattcggagaagaaaccaatccagaaatattagggcatgtattatgaaactagaatttggaatccaagttggaccaaccattgccactgtcgtgctaaattttccttcgtcaaagctcaccagggttccatagctgaccatgagacttctagatcgtgtggaaaaagccatagcaggaacctgggcttagtttccggggcaaccatttgaggcatttcaactaccaaggctcttgagctggggtactcgacgatcgccattttaccccgcgagattgcaacgctactatcacactctggtaagaccctgaacaaaggaagcacttgtaggaccaatcaaaaaccgcttgtgaatatggaccgatgatggtacggtcctgtgataaaaaaaactcggcgatgacccacgggacaatagatcaaggaggttctatttgtaatcaagagaagaaatagcaaattttttcaaaaaggtccagacacgattcacgaacccagtctcgacagaccagtaatgatgcaacatacctttgttgcttggtcctgctgaagggaccagcctcacaggtacggcagttgaggtatttggaatatcacgcaggtgtccagcaaaagaatggtacgctgaaagcaatccatggtcgggttctcctacctcctctcacaagaaaataacttggtcctccgtcgagtggcgacctgttggttctcgttagtctcgtcctttgaaggatgttcaagaaggtatgtaacttcttctgtactagcttccccaaagagtatacccacttcgaatgcgaaatctgcgctttctatgtgctcagattcgatcgccagtcttataaccctagcagacagtttataaacattcaacggatggatcagctgggattatataagcatatttttttgggttttgcctgaaaagccgagaaaccgattggctcacggaaatggcaaggtcccactccttttccagcatccggctcattctacccgtcctcagactctggagatcgagaatattttgaatacagtagtgctatttcataatattccaaaagactacgcccgtagtgagtatacctgattcttctgcattctcctataactattggtacaacctcaaccatgactgatctagaaagcaggtggagcagaactttattggtaaggtttctaatgagatcgataaatcctaagtatccatggataatttcatcctctcccgaggcagtgtttccatggttcctcgaaaatcatttgttaagattcaagataaggcgattagtcatgggccgacgatcccgccctcggttttgcagccatcatgaaactagccctatgacttgagaatggtaggaaagctttccttcacgtcaaaaataactgtggcatagattgaaaatcaattgtatgcctcagtcccaactacaaattactctggtttcgacatagctaacttacccgttagacccattcagaccactgggaatccagctaagcataattctcctaagacgataagagtccagacgtttttagagcttccaaggagccccctagctacgatgttatgatctcattgcgggggcagttttcggttcgagaggcttttataaaccaagctgttaatcgtttatcctctatacttctagccctctttgtacccgttaagccttattagaccatagatacactcatgaccagcctaccactaaatgttggggccattctcatagagaacatctccatcatctagatcgtatctatgttctctaccggcgcatacaatgccctagaaacagcgattatcacgttcgacttattcaagcgctaccggggcctctatttctagagtatgcaatttgcatcctagggaattctcgtatacgccattcctactatagctcgctttatttcttaggcgtccaacctcccgatatccatcccctttataataggatggtacactatggttaccggccaagctgtcgtcctctactcgcgtctgcacctcgttttctccgacatgagaaaggtgcggtgggttctatagatgatcattacaaacgcttgtatcctatatatactaataaccgtttttttcttcggccttaaccgcggcgatatacgctttgctcgttctaccgcgatatttgaccggatctaatcgacggttttttgcatataagacttcgttatctgtagtatatatatatatataaagcggtatatcatttcaagagtgctattataatccgcggtcgcgacagccgcaacgctattatctatctattttatattaacatcctcattataatcctaaacgtcttactattcctcgcggagtataagctacactacattcaagtaagctttaagacggtagtgtacagcgtcaagctgaagttggaattctctgtgctcaactgtctccggttgctgacaagtacgaacccctatatctgctagcatagacctaaggacagccgtcgattaaacgataagaatatttttagtatggcctctttataaccagttatcgcaccagatataagctcgcaatctagagcaacctaaaccgatataccacgttcgttacaactaagcagtatctatggatacaatgaaacgctacgcgagatatcgagcgagaatatgatactccctagagacgtttattcttcggcaacactatcagagggccacttaaatacccttccgggtagctcctcagaaaccctacctacactagaattgagcctatcgcaattcttgccaaagttcgacatctaagtattccacgagggagtactgctcgtttatttcggcttattaacagcagtgcggggatcttatacctttatcccagataggcataattccgtacaaccttgctagttagtaggtggcgacatccttactaaggcacttgattctaagactttttagacagtgtgattaatattgtgcctaagaggatgctattcttcgcttattaagcaaatgtcgtcaatgtcggtcggcgcgataggccactcgtaggaaggggtagaataggaaatacatatacagatcagtgatagagtatataagggatatattatcaaacaagtctcgtactatctatacgcaaattcgttatccaacgatatttactaagatacctttcggtttcaggccactggaggtaaacctaattaagcaaccaggccttgcattgaaatttgtacttggaacaatcatagaagctgagggaaggcttagtgtaaagtaaggcaattattatctaactaggcgagtggaaatcttgaactgtgatagagttttatttacctctaattcctaaagaatttacatttcggacaatgaatttatcgttagtcccttcagtagaagtaaatctttatatcctttaacgtgattaactaagtttgtaatacatttccgtagcatttgtaatagatataaataataaggttaatcgactctgactaatcttcggggtatagcgcagatattataatttataggatacgacggaagccctcggaggttaatcctatatataagtgataggggggaatgactttgtgagggacataagctgtaaggggcttggctaaacaatcaggataaccctataagggtacctaattgagggtaacacttgttgctagtatagaagatagagattcacggcttagactctgggtcgcttagagatatttgaataggtataggatgatagtacttctagaaattaatttagtacctttctaacgacgagatcgataatacagagaacttactaattaatattaggaaagaggctaatattttatatttaagaccagaacgaagatcttcccggatttctttatccgaagaacgaggtagatatcggcatcgtattccgagctatattcggaggcctttttaaaaagggactttcttctcctacgtgctttttgattcgctgcgtcggctggtttggttttaagtttaggttgaatatccatattaagattcttcgctggctctgaccgagagcggacaagaagtaggaggataaaatcaaggaggaattaagcgggcaattctaggattcgagtttgttcgtagtgacttaagacataaatagtggtctatagcgagcgccgcacttttgtgataggggaaatttaacacagggacagaatgttagcagcattagtcttcataggggatattggttggttaagtccatcgttgaattcgtgccagatcgtataaggagtggtaagtcgacccaacttacttaaacggggaactccattttctattcagatgtaaggacattttatcataataataggctcaccacttgttccggtcaatcggtagaatcacattagtctcgtctcgaaagccaaatttctacctgctgcggtatactttaagccaaaagaacagcacaactaggctacactatggtttcgtgatagactcatataaccgcggcagcctcaacagttcaagcgtccttgcattcatatacacttcggagatatataagcggcagcgaaacctagtataaccttcagctatatgataactaaccggtatttgatcacaggaggccatctccccttttactataatactcgtgacatagtgtctacttttgtaggcagttgcattttcgccgacctatgcgcacctgagaatgacctctcccgaaccctacggatctagtagaaagacacttgacaactcgccacttgctgcagatggtagtgactttccttacaagatatccccaggtaactttatcgttccgactgaagaggcgacttatcggactgggagcaataattccatcaagcttctaggcagcgccacccatggcggtgggtcctgccaggtgagcctcaccagtgatcgtgagccgacaaagaattcggaatggaaagttatcaagtcctacgaagggggatgccctgcaaaaggacccggaaatcttgatgggagtgccgagtcggaccattctctccaactccacttcgcgatccctgacggtattgcacccgggaaatacaccttggcctggacatggtttaatcgtatcggcaatcgagagatgtacatgaactgcgcacccatcactgtggctaatgagtcgccgtcaaattcgtcggacaacacacccaaacaatcgctggattttcctcctatgttcatcgccaacgtgaatggttgcattaccagagaaaatgtagacattcacttcccttggcctagaagtattgttgaatataacggcgacagcaaatatcgcccgcaagaaggcgaaccggtatgcaccggaaatcctacattcggcccaattcccattaccgatacagccgacaccggcgaggctagttccactactgaaaatgccaactcgatgccttgttcgtgtggctgccagggtagctaaacttgtataaatatcctgatgagcaatgtggtcctgcaccgcagagatatatagacgggagcgttcagacccatctagctcaatccagatcgtctgtgaagtggaaaattccagtctaataatattcacctctctttgttgattacaaacctggtttcagtattatagttccagcggggagcacatctgcgagataatgatagtattttgcccagcgggtatgattatgtgacgaactgagggagtggtcaaataccactaggacccttcgggactggcttattcatcgttcacccaattccccctagtatttgtacggtattccgggcacattcggaagtacggtgttgcaacacgccgaagcttatttgtatagacccctgagatcattcgaccgatctttaacacctacaatcaatcacctgattctattggacatgttcagtactagccagtacatcaattcctcatcctgacagtatataaaaatcacactctcaagtactcaattggctatgcccatactagtccgtactgtaacgaccacgttccgacacaacctcctggtttcagtgatcttatctgagtcatccgtccagtggcatccacataccataagctagtagataagaaaggacccacctatttggctcacgggattgactgcaaggacaacgcccagatggcgataatgaccagttcgacctatttagtgtcagcattattagtataacggtataacgtgggaatccgcgattacctccaatgcaatcatccacaatctctccaacataccaatgacagcaatcacaagcaaaagaagtgctattgcagagagataacacgagatacaccgcaacttagctcgaccagcagttgactgttaaaataaacaccaataccatacaactacacaaaggtaatccgctaagagaatatagaggctacccagataagcagatttcaaaaggaaggttccaacgtgagagactactattttcgccaaagctaaagccacagagaaagaagggcatataaaacgcagtaatcgaggtatgagtgggttttcgcgctgctggaagattatgcgaatgtacttcagcattattagctcaaaacgaagacactgtatataaccgagatagtattttgcccagcgggtatgattatgtgacgaactgagggagtggtcaaataccactaggacccttcgggactggcttattcatcgttcacccaattccccctagtatttgtacggtattccgggcacattcggaagtacggtgttgtaacacacgccgaagcttatttgtatagtcccctgagatcgttcaaccgatcttaagacctccaatcaatcatctggttctattggacatgttcagtactagccagtacatcaattcctcatcctgacatcatgtctcaaatccaaacagaagcaacgaactccttgtgttacatagaccctagttaaataggcgataaacgaatgcaaacgaatgcaaataaattgacaataccgatgggtcatataagtaagaactgattataacaataggtcgcaaattgagtgtagttaaggggctacactgagcctactatatttgttcgcttgaagagcgtttgcaaactaccaccgtcggaaccatgctccatctaccaatctgctgtacctggctttccttatgcaccaataataatatactgtctaaacagcacagatagaaaataggatcgcgggttccttctcgatttggtaggcctcaaaaaacagccaagcaaaagccaatgagtttgtccttcagcaacgagcatagtaagatttgataccgtgataggcagtcttattagctatactgaccaacaatttcaactctccctcgcatgaatctcaggtaaatatctcattctgtcacattagccgagaacataatgagacagcatgaacttacctgcaagatttcctcgacggagatactttccagttggcaaggtaagttctgaatctccgcttcctactcgtatatacgatttttcaacatcaatttcgtgataacatcggctagagcgtataatttcatcatcgcaggattcatttccgattctttaatttcgcagctattctcgacgcccactattgaaagtcagtttttatcaattttcgcaatatctatagatacctcactaatcttgatatcactagactgcgtaagtaggattgtttccgggcctagggtagcgagtactcgcctaagcccgcgcagatattagattccttctaatacctatcccatattaatttcaaatgcacctacaagagattttaactgacttaccggtttgacaattccaacgagttcgtcggtggtaatcgagtagctagaggctaaaatgtggctgactgatacctctgttagttcccagatcaacgtgtacgatacatcataataataacattcgagcaattttaggaagcttggatagatgacttgttccattagttctaggaaacctatagcgggagagaacggtttttcaagttattagatatacactaacttgcctttttccgacttatttcgggcgaatatcagagaacgatcttaggataaaccaatagtaggctcgaaagtatcctataggttctgattcagttgtgggatgcttacacttgggcgatccgggtatggctctattaaacctagtgtgatcacagcggtagccattttctatattattaggggttggatatatggagacaccgttgagtttggactcagctgctgattacagaaggccgacttatcaagccacacggtagaaggccgggtatatttggtctaagcgcggttcattatattatattgggtttgcagcgtgaaaaaatatagcgaggatagataagggtcaaagaaccatttatagctctaagatattattttaatacatgaccttcgtcttcgcaatgtcagtctattagtaacaatataacgacgttagatctttaagtgtggtagtgaattgccgcaattatagtaggttacggtaaacctctattgatcgggatttctatcactatcaattgaagtatagaaagttaaggtacagttgagcggcatcagaaaatagcttataattttcagtttattttaaaaggtctactttcaacatattcagatactgttccccttaaatatctaatattgtgttttcctttttactagagtctcgctgcagaaaaggacaataggaggtaaaattattcctagacagagatagatatcgtgagctagccctattctgctcctccgtggaggatattaagcaaattaaatggttcgacatttatcaattattttaataactaggaggagcagatagcataaagtaagccatcgagtggtcgatgaccacaccacatttctagaccccttagccggtagggtaggtccgatttatataggggcaggaatatgagctgttatgatagcctctaccgtacccccagttagcagagtgaatattagaattattaaagctaagggcatggcggcgttgttctaggagggcgtttaggttgtctttatgctttgagtggacgccatttcgtctccgacacatacgccgacagtagggtaggtcgtaattatatcacgtgcaaaactctcggtacttaaaattatcaacctataaatatagcaatatcggtaacgttagttaatcaacgtactggttttgtacatgaggcactgtttctagtatcacggtagtcgttaggactttggtagacatatcatttagcctaggctagatttaattcctctatcgaaaacacctgtctcctagctatatcctgctctgtggattagagatagtgcgagggaatggggtttgcgtggtaggggcttcttaccgtatgcactggcaaaaccagctaattcccaagagaagcgcgttttaggtgatctacctaaggatagaactcagatatttaagtagaaaggggggctcacaaaggcggttggcctaatatttacactctctcatatttcacttataccttagcctttaaataaatcatgctggcactaggatcaccaactacccgaaatatcaacgttagttaataaatagctttaacggtatctggatcatacacaataatatgaattgttacttaacacgtttaactacccaaagtttcttaatatagctacttaaactaaatcttattgcactcaattaatagcataatttaagagcttggtctgttagcacaacttctgtcaccgtatggcatatacgtatatagcttcctatagctgtcatattgaacaatttctttgatatttcggggaatcacagcatattgatctggggaatcaatagaccaaaacttgagatattaaatttctcgaaacataccctgtctataagcttgtttgctaacaacatccaacatcaggtggaaagttcgtatatcatattgtgttttggtggcaaaagaaaatatagccggcttctagcttccttgaatttggctgatactattgctttgctaatacagacttctattcatcaagatggccatttctaaaatttgatgatttttactggaagatgagatagactcgcaggaagtaagagtaggatttaacaatcaacatgccagcaaaaaccaaagtaaaggttctttcgaggtacataaacaatagtatatatttactatctacagggttatggttcaatttcttttggaaagatgaagtatatttggcagaatgagaagtgtcaatctaaataaaagcatgctatctatcggtctatcagcaatcagtctaaccattctatcgagcgccatttaggcgatcttcaatctactgaccgccgagggcttccgtacaaaaatctcttttacaattgaatatgctatctttctgggctcggaccaatttccttagataatagggatacatgatgaatattggatggaaatcggaaaactgaacaagaagtgatactgtgagacagggatggacgagaggactattgggcgcgcccaaacgtctacatacagactctttgtgagagttcacaactaaaccctagaagcaaaagggcttccgcaataccggaatgagagttagaataaaaaaggaaaagatggaaaataccagtctcgatgcaacggtaatacttctgaccaggctcttctctgtgctgaaaaccctgatatcacgtatcaagagcggtagatactcgagaacgccggatatccttatcttctttcctaacccgctccagcctatagaacttataaagtgtaagaagtgctaaacaactcagaagagttgctctagtaacagcagttattataatagccatcaccgaccaatccccaccttgagatgtacaaacattgatgacagtggtcagtagcccagcagcagtatataggtataggggtctagtccaggattagagttagatctagctttttatacctctttcacttaggatttgctcacttatacaaatactttgttaatcagccaggggtagtttcccctaagctttaggaaatgcatcagccacataagagccgcaataccactaataaaaagcaagtacgcaatagtgagtaatagggggttctatatcatatatagaactgtgcgaccggcctcattggcttgtaacgtccttttaacctggtttaaggtctacagtaaagtgaatgtgccgggaatgactagatagccggctagtagtgcccagttagccgcactaaccgtgatactgaaccgtatgtctatatctacttcttccctaagcattctagcgtagatagtttcattagcgaggtatatctggttagctctacacaggccgggggtcacatccgtagctaagcaaggcggaataagcataggttcaatttcgcgaagtggcgtcttttctgatcctattttcgctggcgtacttgtatgatcgttctacaacaaaggcaccaaaggagttttagtattaccgtaagaaggtaaatcaacaaagaatcgtatcagctctttaaatagtccatatgaaaggccgctacggtacgtggtctaactaggtctagaggtcctagtatagagggagacgcatttttgccttacggtaagacttacacagtccgggttccgaagccaaaaacgaatggcttctaacgaaagcgcgaaagttgctatataattagtttaagcgagcgttatctgcgaatgcaccggcggaaggaatctggtgcttaacatatttttggttcagaggggattttaaggcgagataagattatgccaacttcaacctaagcgtcgaccaccattaagccactgcctgtccctttcagataagagcccgtatataaggttcccaataggcctattctcttaccaatctctcaatcactcaatctctctaatagctgcctggcttaaccttattaaagagaatgaatcttgggatttagttgataccaactgcctagaacaactagtgtaggaattacctaatccaaaatattaatatccatccctactctacttttacggaaattcaaaccgcaataaagccttgcgggctctattcccctataacaacattacacagaaaggccctataggcttaatccgtctctatcttagcactaagaccgcctatacacagaatcctatattatttactaaaagcagtctatatctcgaacaaagcttaggggattccaagtagctcaagaattcaacaataaggtatcaaaccttcttactagggggtacagatgggacgttaacccctataaggctacagtaagaggttaagaggtaactcgttttaccatagacctagatcctatgtttattcctcgattccgtccctgacatccaatccgcaataaacttattacagagaccacgtcaatagcttacaattggcgataaggttattcccgctcccctgtaggtagtcatcgtcttgactaacagttaatatataacagaagccttcgtataggaatacgcttagctccaaaagctcgatactaggacagtcacgattctagacctacgtccacgtcacgggcttttagatagtatcgttttctagccactgcaaatattaatcgttaagcagcttagtatagtctaggccgagcacatttccaattatcgacgcttctcggcgttttatctgagcgctttctggagcacagaggtacaaacccacgaatggctcctgtatataccactatttaatcttttggaaagagcccgaagggactatataaggaacaaaacgatagacgattgccttcgagaggttatacaaacatgcattggctacctaaaggaggactttaataaccttatagcctcggccttcttaatagacacctatcccccttaaatatatggtataactataattcttaacttatactctcctgaacctaactaagaagctaacctgtctaggattctcgcctactgtggtattcgctaaactttatgagaagcgatacctaagtatttaggataataagttcaaatactatattactagcgtttcatcccgcttcgtacaccactttatataattgagcgtagtaaagatatcggtagccattcgaaaagagacgttatatcgcttatattactagtagggtggtcttcgctccaccactacttatttggtctgtctaagtcgatccccagagtatatactcccgtgtaagcatacaatatataacacttgtgtcgtaatcttcggaaagccaagtcgtcttagggagtaccatttcgaggttactcaatgtcccatctgtaaagagaggtccgacgtcaccgttcgccaactacctccaacgaagccccctgtgattctcactttagatagtggtggagtgcgcggcctgatccaactaggccttctacaggttttagaaagtcgcattggcattccaattgtatctttaccggacctgtgcattggaaccagtgtaggtacgtacgccgagtagccgagtcttttattgtggttgatatactaagaaacctcctctaggcgcattaacggcaattgacgtttttctcaattaatcttcggtcacacaatgtttcaatgcgttcctacacctagcgcaaaacattttttgtcattcgtccaaaaccccaattccttgctatatccggtggtttgcctcggtattcaacttgactacagatagcctttataatcccgaaggtctatcgaagattttgaaagtagccgttaacccatctcgttgtatattcgatatcgccaccgccaatcctatgggttgctggatcgccattgtagtaagccgtatatctgatagtaaagcctacgtgttagccaattaccaaggaggaagtctacgttctaccaataccgcctacgagtttctaactccatataacgaccgataaaacccttccttacttaacgcgtaagtgaccgtttacagccagttgatttagatagtggtagtcgaccttgctaatagttagcgtttaataggtcgatatacagtggtgtagcgcccatataagtccaaacactataagacatttcaatacactgacattttctagctacttctaaccaaaagagttaccaggcctttgcctacaagacggtagggtccgtgcgaataacccactcgccattgctttgcgagagtcgagcattatctggcctatagcgaaacgatacaaccttctcctctctatcagaacaggcttctccacatctccccctagttatctaacgggcatactaggtcgactctgggagggactcttccccaactattccgggccataatatactctctatctatagacggaaagcaagggtttttggaagctctgaattacctaccctatctgtcgacgcctgatattttccaactagaccaggtaatcgataggacgctccctgaattagacgatatatactcgctggaagcgatgtcgaatatggattttgcagttccagctaagctcgtaaggaccattctcgcgtcggcaatgtttttctttaagttggataaaactcctatctagggtaaggcttcaatttattatcgggggtctgttctttattcaagaccaaatcctgccgagatcttatagcgggtgcttatcgagttccccggcgctagatttaagtctggtcaggatcttgatttaggaagtatagatctagtcgacctttgccggttttatagatacttcaggaagcgcgttgattttcgggtcaccagccttaacgaaatagtcacaattgaaattgctaataatacctttcgcaaaaggattagtggtttccccaaatcagcgtaggaattcctcaataagcaaaaggcttacgcccagtttggtcgtatagattatcagaatcaagaatggccgccgcagagatcttattactgctattgtgggtcaaagcgattagtccacttcctagagcctactttagggcagaaaaggcggcgtttatgaactgggtgaagttatggtttagcgctcaagtcagttaataagtagaatacaaaatctagttaggtctcgacgggttaccccgataaaatgcaagacgcacggaggctaggtatactctggtaatatcaataacaattagaatcatatgattatcctagatagaagtctgaattcgaactgcaggatataatctatctataccttgtaacccgtggacacgtgttatagtcgccctcgtttattgaaatctaaaagtgcgagtaggtggcggggcgaagacagaagttcgcccgctatcaaagaaccatacgacgtctctataataccaccccttagtatagcaatatacttggcgcctgggaacattggtaaaattcctagagactaacttggtactataccggtgctagtctacggctaagagtgcgcggtttgtcaacgtggtgagaatgtaaggcaagccgttcagaaactatcttagagtacaaattgactatttcgcccatgaaatggactttccgttcttaaaacgctagtaactcccgtcctctatgtacgtcggtttcagagagccgagacgtggatagtccatgaccgatatcaaccctttccaacatcgaactcccggttactctcgcgacaacacttcaagcatctacagtcgatccacggacacagccaaagatgctatccctattaataccataccaactaccctataaatcaagctatctcttcctaagataaatttactggaccaccaaatctctatggcgagcggatctaccatggccttggaaacaacccggccacgactaagaaaatccaagaccctgaccgaaatgtcggtttccgagatgaaggccgaaagaatgcagcagcactgtcacctagacagaattaaatctgcggcttgagcattttcacggaacttgaaagtataggagcaatttcaggattcattctttatattcctactcgttttacgaacggtgcagttcgccatgcgcttgatgttgtaggtaggatgcgcggacgacccctaagtacttttgaactccgcgtgtaaaaactgtttcactttagagacaaagtcgtcttcaacgctctgaagcactctcctaacagcttccggaagcaaaaccaaccgccgggctaaatgatcggggttagcttcacctaaagaaatttgtaagcaggcattgtgttttagctgggctctcagctggtcgaactctgaaaccgatatcttcacgaacttttgaatgcgataaagtcttttagagctttcgaagctagcgatacatttcgaaaatttgatagcggcgcgaaccatcttaaggaatgttttccgatcgtagggaatgcggtgtacagctgtgtggcgaatgctactaatcacgcgacgccatcctgttaacatgctccaggtcaactgaaaacattcgtccttaacttttccttgatagacttctaagagacaaaagaatttgtgcaactctaaggcctctaggcaagtccatccggctgcgagagactccgatagaagccaacgctgaaggaagcagaaggcatgagtttcgagttattgctgtatggcttacaggatctggtattaagcgcaaaagggaaagtagcgagccaaaaatccaggtagtaagattatactttctatcacccctatccgaagtagttagctaattagtaagcacgccggttatcaaattcggtgacaaacatacacttatgtagcaaatctttcgggaccatagaggtaactaagttgtgaattttagcctttgggggttttataaataataacctaaactaatgaagcgacatatagcctataagctgctgaattcccctagtatatatcattgctaaatgtaagaacctagttgactgaggttggggtaccgtttaagtgggtagaatgaattcaaaaattcctcatgtttctgagtaggcgatagcatcaaattgctgcgggccaacgagtttagattatgacttcaataggggtcggtagctctctccctcatgttatatatatccccaaaaccacaattgtattgcaaggctgcctacaaaagtcaggtatataacatcgaactctttccctcattccccttcacgatgcatatagcgtttctaaaaaatattacagatgatcgcactgggggtcttcattgtgggcgtcctactggttacaattccagtggtatgactctttctctcgccgtccgagtccgacttatgctaacaaggtcactccgtccactttcattccgaacccacctcatccgcttgtcctcagtcatctgtcttgaaaggagttaaagcaacacaaagctctggaagtgtcaaagccatcgaagcgaagactgcctaacaggagagaccttccactgctgcttccactcctgttctgcactggtttcctcggctcgcgatttgtcaagagccactcttaatgaaacgatagctcgaatcaagcgcgggtccccagaagggctgtttgccgggttgaaatgatactgcagagccagactttgggttgcgtccattgtggtgctgacaagttggtggaagctctcaaaacacttgcaataaaaatcgttctcaagtcccttggagtatagaggatggcggtttaaagaaaccgggggggcagaacccgtcatcgacgcgggatgggtcttggaaggacattgttacgatctggtcattcgatctgatcggtagtgaatataggaaggatacttctttgcccaggtgatatcagactttttatagcaaaatacatacattttaatttactaatcatagatctgcatctcgaatttagttaaggctctcataggtaaatggtcaccccacataccttgtgtaaccccaaaaacttttaccgatcaaccacaccgtgtagaggacatacagacatacatgtagcatcgcccagctcgcacctagcaacgttttctccaccattagcgtacgcccgtgtatttgctaataccctcacatcccccgaatctacatacataacaattttatcaaccaaaaactgtcgattaccataggtcacaggtcccggtgcaagttccacggggggtcctatcaattacccgacctaaattatttaatgtaatgtgaattaacaaccctccccccaccacttctcttatatcattgtgcatgcaccttcaatgttaggcgcagggcccaccccaccatcttttattattctccctaattccaaggcattttatgaaattgataaaaacggtgaatacatatatgtattgagctagaataatacttgaaaatatcgaagctctataactgtaccgtaaaggtcaatcaacaacatttaaatgttaggcctgtatggcgaaaatgtccttaagtactccaaaggctcttctgctgtattagtgatttcagtactttttatattgcactcgatcatatcacagattgacggtcgctaagttcgtggctatgtatttacatgtaatcaatttgcctcaccccaccccgtcgatgactctgcttcccccgcacctagtatgagttggcattgaatcgcataaaggactactgtactgtcctacgaattcggctactcgggctccagatgatcatcctatttaaccctgaagacaggtttagaacccaactcagctgaataaagtgattagctgtcaccatctgtgtctactttggatgcatattgttcgcctgcaccgtgcactgatcgtcgtttcagatcgacttgtacggtgtccaaacgctacatagtactagatacgtattaccactcgtgccaataattcttactgatcggcaatgcacatcagcgaactgagactaccttagctaacttcaagtttgcctattcatttgcaccgaaggcttctttagaagagaaaagattttcccatcaccagcaaagggtggcaccatccggcgacaaattgttccccagtaatgaagtcagtcattcagtcacaaggaacactcgtgtttagtcaatatcgatgaagtggttggaatattattcgactgtaccatgtggctggctgaacactcgcgatccactttgcggcatttctcgcgaatggacgttaccatgcacaggaaggtttcgctcctgccggcttgaagttcgcttggatgaatccaagtctcaaaatccacacagcttggctcaagcgtagatcatagctgttaggacgccgataaatacgaaggaatactgcgtatgagtgctgagtaaccaacaatgtctgctatgggagggaaaggaagctattcatgatgctggtcaggcatctttacatgcgggatgtgggtcctgtgacgacccacacatccacggtgttgttaagttggcaggaaactttgccgagcataaataacactagcctcctcggtggcctatcattgaatccacgctcatgattcctgcagctctgaaagttatcttttattttgttgaacctgattctggactgtaatatgatgtaatagttggcaatgccaaaattattgcgcaattcgtgtaacccggcagcggaaagtttcaaggaagtccgaagaaaaccgcgagactctaaacttcaaagggaaaaatttaaaatagcatagaataaaatttttgagggcgctgtatgggtttgtgaattaagctctggttatatctgatttgtaacctatagttgtcgctgaaacacaggctttaaagtctatgtagttatctgtcttacgatctagtaaaggcattggtattatcactggtcggcaaagagtagttttacttcagtgcttgaaagagtctccgtgtctccagcacggaaggtgaacctgggttgttctgggcactgtttcaggcaacacagtacttgcaggcggaggggaagaacgtaaacactatttacggtaatttaccgtgactcatccaggctacatagcatgatgggatcttagcccaataggggaaagtggcgcgctgtgagataagaagagagagtatcgaggtaaatctgatttcgaatatcactgtatagcctcgaaaccgctgtagagagtcgggtttcgggacgtactgtacaaatccagattgcgcggacgttgtggttgatactattgcgatataaaattattgtgttgtgtgccgagcgggagctaacgccagacgaatggcggaccacgggggctcccgagccccttgccaccacaaccacgcggagaggcacggggatcgtcgtaacagaaaaccttgcaccaacgaccacggtccggaccaggagacatgcacgagtggaaagcgagcagacccacgcggccccggagcccgtggaactgaccaataccggaaccagcactggacgagtgacaaccagagagatttggcagattatcgtacacctgcaacacaccgtcgaggagcaaaccacgctcattcacgccacccggaccgaactgagagaagtgaaagataaccagaacgagcatcaaactcagaatgagaagctacaggaagagattgcagcgctacggtcgcaggtaaacgagaggaacgctccaaccccgacacgatcatgggcggccgttgcggccagcacggacaatccgcaaccccgggagacccggcgacaaactgacaaagacgagaactgcgtccgaatcagcacccagcgatccactgaagtgctgggcgcagataataacggagacgcgttcggccgctacctccccaccccgactgcgaacgcccacatcaggacggcactgtcgaagacgctatctacccaggacgcacaggttacggggattgttgctactaagaccggatatgtgatccccgttcaagaaccaggcgtcggccgaaacggcccgcaccaacaccgagtggctgaccgggcttggcaacgacactagactggtgaagccacgtttcagccgttcaccataccccgacctttgggtaggacctcgaagacaggaaaaccgaagccatcggaaagatcgcaaacgagaaccacctccctgaccgcggatttcgaatcgaagacatagcctggctgaagaaaagagacaaagaactggggacattcgcctcaatgggcatctggttcgactcattagaggcagcagagtggatgctggacaatggtctattgatcgatcatccgcacattcgaagagtggaaaagtgtgagatcaaaaagaaacggtgcttccgatgccaaggattcggcgatctagcgtggtcgtgtaaagagacgcctcgatgcggccactgtggcggccaatatgagcgagaaagatgtcctccgggaatcagagagcgctgcctggaatgcaacggggaacgtccgactggagacttgctgtgtccgacgccagccacggcacccccatcgcaatgctagagaacaaccttcgaattctacaactaaacactatgaaatcgggggcgggcatggaagctctcatcaacgaccatcaaagccagaaactagacgtgctccttatccaggaaccgtcgattactgcctaccaaacacacgtgaaccacagcgactatatcaacccacagtggagagcgattcggttcgattccgaagccttatctatgtcaatcgcaaactctcaacctcctatcaccgacaagtgagatgcaaccacccagatatgaacgcccattgggatatatattccaatcggacacctcgtcccctttcgttgaaagtctcagaaatccgataaatggaacattgtagaacttgcagtaataaaaaaataagggtagaaaataaaataaaattgaaataaaaatttaatgtttctatgttcttgatcacacgtccgaaaattgagtgttgacaactatggccaagcttcaacgggttgaccgacggtgatccaacacaaccaacgccactaatactcgtctctcttgctgagctaaagacataaaaattgtcgctggatgtcgctgcaaataattgcggtaaaagaagatgtgggtttcaacaggcctcaattaagaaatgtgtccttcaacacttccaaccaggtcggtgagtgacagaggccgaaaagcctataaatacgtcctctacccctgcaattgctctactttttattcacttgattctgcaaagtcgagcaggcttgttgtgtctgacgcactcgataagctcccccctttgatcgagtactggaatttataccgtactgacatttatagtatacatcgtggaccagcaaaccagacagttcctgtactgtaagagacgtggttccaagcattcactgccacatttacgccagccgatcggagatacgagatttggattagctggtcaaggcgactatgcgaagacgtctctgctatagcgagctgatctactgtcgcggctctggttgaccacaaatttcaagtgcaactgctcacactgtaggtatatgggcccacaaatccttgaaactgcactgacccgaaagacgcgggacagccagatccgtagacgttcgaacacaatgcaccagagcaagggccactcttcatccctggtcttgaccatcagaaaatgtgagttatggaattccacgctggtctactggctaataattgacagtgaacctttgggagctcaccagagtggccctgataaccctgcactaccgtcagtgcaaagccatggcttacacactattcctagccccgtcgcttcgaacagtgcagcatgtcctaggtggaagattgcaaaccaagatagcgagtcaacaacagggtgcggccatccacgtgcgaactccgttgcatagaaccttgcgactccaatttccatgctaaggtgaatgagatctaacgcctacagctgcgctgtctgattatccgcgccaagccttattcctctaaccacgaacaccactaacatattcacactattgtagaggcaccccatcatcgacggtgaaatatactgtggcgagtggcctattccgccagatcgaggataagaccaaggtggcggccgaacagcgtgctccatcgcatcgcgtcttccgccttcgtccccaccgccttcgcactgttgaggagtcctgaacctctggcatcgcgacacgttcatccgccatggaagtgcaatgtttatcgcgggtgggttcgtacagtaaaacgcgtgatcaattgtactgacttcaggccaagacggacttctgcaaaatatatggagtgaaaatggacggagcgcgtctgtatctgcgatcgactgtatagaattcagattcggagagtgaagacccattgttactcgacgcaaggggtcagaaatgtcgggacaggccgagacgcgaacccctgaaccgcccgaccgcgacgaacacgaaaaatcgccgccaccattattgagaccgagacgcaccaccagaccgcgtaacaactatggccaagagcaagaaatcgaaatccagcagagaaatgcgcgctctcagcagaagaagagaacccggggcaagccagtagcccaacgtgaagcggtgacttcggacgacgcgtcgccagcgacttactgccattcatagtccgcgtaaagacccgtgctgtccatcccacgcacatgaacttgggcgttgatgagctagagcttccacagcgtccccgtttatggtctcattgaggattcgtctgcgataaaaagtgtaggcaaggctggaagaaaatataggcctggaggaaaacataggcctggacgaggccctcggcggacaaggtttgcgctttcttgtcacaattgagttttccctgaagaagattccatttctcaaaagaatggcccgctccttgtcattgagacttagtttggaatatccgttaatctcaaccagcggatggtccatgtcagagctgatgtacattctatcaacaccattctcctccgagactagttggtccaaaagctcactgatcggttgaatgggcggctgtgacgatgctcttgtcgaccatccaaagggtggctctcccttctttatcagttgcaaaagacagattgcatcacttcggtgataatctaagacatagcaccatgcgagggctcttccaaatggaataagtagttcctcttgatgtctttgtttaaaaatttcccatccggtctcaaagacgtgtcgtacagtatctctgtgtacgatatctcgccggataatctgactgagctggatcagcactttgtatgttccccagtcggtctttggatgaagatatttggcgaaagttgactcgattatttgcctttgtggtctttgtgcttgcaaaacatttaaaatccggcggcagacaagtattgaagaaaaaaagtcttcgagatcttgcaaatttccgaggatttttaagagcagttcaggaggtagagcaactagtggaggtatggcgttgattttgtggacgtcacttgagtctgcagttttcttggtgttcctctgaggcagttgcgcaagcttggagtgtatataggccaaattttggcacgaacgagcacaggtgttctcaggcattttgatattggtataatggtgtgtaatggattgagtcgccttgagggtggccgtggggtttaaatatcagcatgtgaacattgcaccttgctcagccaagcgcttcgcctcccgatacactgattggtggctccgatcacttagcatcaagtagttttaattgaacctccaaggagagaggagggagaactgtgttatgcgtctgagaagacggaaagaaatggcagaatcctgggtggcctaagtgggattagcgctctcctaggaactatattaatccgagttcgagtttggatatccagattgcaatgagcagcctaatcttatcccctatcctccgtttcaagtgtgctaatagagatgcgagatctcatatttatttatttattttttttttggttattatagtagaacttatgcatggtctaacaatcacatttgttgaggtccgcagctttaaaatggctccctactgtctatttgccttgtttgctggatcaacgttctagaacccctggagttcagctgtgggtctgtccgtctagacagcttggccacacgttgactaaatctttgaacccgagactatcaagatactttttgcttctacatttttctcattttgatggcagtaaactctacaggtttttgttcatcgagtgaggctttcaacaaagtggaaaagggtgattgatatatatacctcctcaccgagtgtcttctgaccctcaacatcttgaggactgatcaaatttgcccgaccgactcgttgatcactatcctatgatcgaattgaccgccaacaacggccgaagaataaccattccccagtcaaaacctgactacattgattgactactgctgtagtaaaactgtatacttagtcagctgcgtctgcatagacttaaaacaccaaagattgatgggagaggtattacccagatttttgacattctcttgcggacaaaatggatgccccgaacagcttgccagaccaggaacatgaaagcaacaatttgttggcattcgggcttagtgaagctggttcatccctcaacaactttgagcctcgaaccataccaaactctcccatccgggagcatagatggtaacaattttaaaacaaatttcgctctgcagacaccattccgagctgagacagttattgaatcatagaaaacaatgttcggaaaatatcttatgcttttttgaaggatgcttttctaaagagtgatgacgtattctgatcactcgccggaagtcctgccacgccacatcaacttaatgcattcaaccaatgtcctccgttcttgctttagattattgatttccattatggatttgcatgaacttctcaacgatgcttcctcgcccacagcgtatattcggcccaataaacaacatccgcggcaatcttcagttcagactaacatgctgccatccttttcgacgttggcgaaaagcgttgactatgcaacaaataatgatagtcagtgcatcttgagtagatatttcccaatacttattcactcacagtatgtattcaggagatcgatccgttcaagcagcatcatgtcgccgtgatgccgcccacgtgcccatctgtcacccttttcaaccacatcatccagaccccagcttcagccagaaaatgagattcccaacagaccaccagagcgccaactcgatatgttgctatccgcactattctatccccaatgcctgtccaggtagttttggaacacacgttcagggatccttcccctcgtcagcgcccagcgtgaatcactactcttccctcatctattttccttctcctcccgctactaattctgcaagcaattatatgtgcacaccgtacacgacctcgttttatgatcccatgtcacattgctgttcgtttcagccagaccctatcgagcacatacacaaagcttggggccaccagcaactggttgaatctccgcttttggcccaaatagtcagccagcccggatatcataaacgtgtcttcccgcgaggtatccgtgcaatgcgcaagaacaacaatcaatatgaatgtagatcttgcgacaggctcttttcgcgcccctcagcactcaacatccacttccgttctcacacgggcgagaagcccttccactgccctaacattggatgcgacagggcattctctgtattgagcaatatgaaacgccatacaagtgactgccggaagaccgctaagctctagcggcgcaaatgcaactccctccatgttctctcagaagattcatttagagaaaccggttccttcatttccaacgttagggcgaacctgtaaaccccgattcgcgcggctattgaaaaatttccggcaagtgatctcactgatttaccaccgcaccgaattttccaagcactatagctcctgtcagggatatacatgaagtatacaggacggatggagttatgaggtatgcaagacccacatggcgtatgcaggttcccctgaacgcgaggaagctacagtaccttttttgcttcctcacgctaggtcttgtatctagagtcgactatatctttctttaattagtcattactcatctgaacaccctgtcttcatctacggacacgtgaacccctaacagtgatatttctaatccccaggaaatttaaatctacccctgggatcttcactttacgttcctgactgaatatgaactggctttgggaacaccttggttagatctgggagctattgcgcttctggggccccacttctggatcctagagtcaatatcttgtctgctggggtcgcggaaagccctcacaagacaccttcaccagacctgcgcaaaaatctgcggcattcaattactcctggaaaggcaatcaatagccccaggaacatgactttggttcctcgaggtggggacacaagaccccagaacctccgttgggcttcctggggcctacgaggctcctagaagcgcttgtatgctcccagaaagcgcactaaagactccgggagcaagagaactcccagggccaagatgtgcattcccggggctgataaaagccatctctaggaacgagactgatttcttgatagtgacaatggacagtcttacaagccacgaacgaattccgtgttgttgattctagcgtcacaccatggcctaaggtctttttattcttacatattggtggcttcgaatggtgctggtattcaatgctcaacgtctagtatcaaatatgcaacacaaatactgcatacctcctaggagccagcagtagaccaagaaattatcccttattgtttcccttttgccctgttgaggtcacttcgtgtctcactttaaacgttgaggaacgtgaatggtccggtcgatagcatatacatatacatgttccaccttgggtatatatatgttgtatccaatcccgacgaaaaagcagacgatcacactcgaattggctgcattctcatcatttgatagcaatgcattgcaaagatccctttctcggggctagatatggtttgtatgtccctttattaaaattgtctagcaatttgacctctagcttagataaactctcggacaatagatcgccccaattttggaagtaaccggggattctagcgcacaaatagaggggttaaataactgtatattgctagtcaatatccctactacgtcgttggacgtattcactaggatattgttaggtaaaaaatccggatagcgaagagtcgggcgacatatacttactataccggactgtcacaactctttatcgcaagcgatccgagtcgagacagatgcaaccctcacgactcaggatgatgcgaccgacccagtgattcctaatcctatgtattcacagaatctacacagttatcccgagtctatggatatcctatggtcgcacagtagtattattcatctccaaatcatggactcgtcggacttccactcgtcggacttccggatcctttcagatattagatctgccctactgcctcgaagcttccatgcgattcgatgtcttgaaatttcattattacatgctttccttgatcatcagattcaaatcctcgatgatgagtggtatgatcaatggacgagcttgtggaatgtcataaaatgtctgaaggggcttttgcatgtccaagcctggctgaagatggaccaagagccagggaatatgatgactgccgaccaggaggcaagattatttgcgccactcatggaacttggttggatacaagatttcaaaatcgagggaacatggccggcaaatgaaggtttcgaaagcttgcttcttggtgggccgtttcagacgacgatagctggtggaggcaaccgtgacctgcttgttgggaagcttatgactatattaaatacatatggtatacacatgacttcacgcccctacccatgacacatatttcaggaaggtagtcccaatagggtacatttgtggcggagtaatcattacgatgggttccgtggctaggacagcttttcttggtatataagttgctaccaggtattcaggagcctaagaccatggatattttggcagagatacgaggctacagtctctttaataacaaaggtgccacttctctgaattatgtcgatttctaccctttattcaataattccaagatgcagagtcttcgtaaagtgatttgcaaacgacgcacgcaaacatgctcacttacgaacttccaacttcgacgcaacatggccttctctggaagcaaagtcctattattggaaaatgagtgggagaatcatgcggcacagaaggaagtccctaataaatcatcccaaactgatgcgagcagaaaggaagcatatcacaagaaaggtgaatctgactccctagaatgcactaatagtaaagtaaattactaagcgctgactaacccgccatcattttagaaccgcccatgcccaaatcgacttccgcaacgtccgaaaccaaaggagctcacagacatgatagtcttaaaatctaccgcgaaggccctaataccgagagtggcgaattggatcctaaatccaaatctgaggaagtcaaacgccacaacaaatttattgctgatcatcatgaaaagctttaaatttgtctgactgatgtcgactttcttagccttccatttccgtcatgattatcactccttactaggtgtctgagctttgaaggtcaatgtgatggatattggtttggttattttggtctattgccttggaagaccctgaagaagggaaatttgttcagaaacgtgccgaatggacgtttaatacagattctaatagcggcgtttcaactgcagtcgcccttaatttgcttaccatcagcccgtatgccctttttagatatatacttcttaccatattaatgaacatacttatctgtttacttgcaatattcaagtcactcttttcgttcattatttcaaaggtcgtgttgtaattcgaggaaatgattgattctcgtatgccaggtagccaataagagccgattcttccctttagtaggacgattgccaaccatatcggcgtgttcaccggaaatgggtctcgcgggctgggatctttgtgtgctatggatgtttgctgcctagcacgaaatgtaggactgaagcttgccagtgtttctataatctagccggtgatcggagacgcaaggctcatgtcgccgaggtctcaaacttccgtgtcgccctttaccggatgactggagctgctccattgtacgcccagcccttctatattaggtaagacaagcgtagataaaggctggtccacgggttacagaaaagatgagtaatttcgcctgacctttcctctttgcttggttttttgcatgatagcttctagcccgatgagcgtccaaagggcgtacgagatacgtcattcataaccaccaatcaggaagatacaatcaagcatcaattttgaggaattatcttgatttgggccaacatatttcagaagttgttgcatctcaattacgaccagcagcagtaatcaaattaccttcgtcgcttttacgactagtgaaatgcgaatctcagtattcctcaggagtttccccgccctttcgaagcaattcctggtatgccttcgtcttacccaggttgattccaccggggctatgctgagcactaagtaaaccggcttcattaattttactcacatcactacaccagtttcctttgttttgactactaacgctttaggtccagcagcaacactgctctggtctttttgtttattggcctggtcatcgccaacatcttgatcaagaccttgtcccttcacctcgtctgagacattttgggtgttcaatgcactgccattaatggttctggcattagtctttacccatagactctcggcactagttgccagatagcccacttacaacttataaccgctcatagggtcaggaatatctttggtgttgaacatgttgggaggctggtaattgaattattcgacaattggcctgtcttacggtaagtgacaatactaatcactttaacaaatatgcgatctctttataggtcatgggtctacataacaaaaccgtgtaataatcatcatacatccgtcatctttaagcttcaggcgtattacgtactccaccacgtggagtatttgacccactctgttgaaccaagttcagaatattttcaccattcgatagcggatatatcaacctttatatttagtaacaccagcaaagttatgaggcatagtatcagatagatgcgcgtcattagcgaaaatgaaataacgccggagaaagtgggaacaactaactcgtcgcattccaatgctagtaaacgatggaaagaggagtctatattcaggccgttccacagtcctggaatgggtaatagcacatcaaaaatggcacaaatgtcgacattgtcacagttatggcaagcattttgctttacgcttgtttaagttcggttatcttaaggataaacatcgtcaataagatcgtgcttagccattgtagtttgacagcctccatatcagcggatcctggttctcttacagttggggagtttctaaagttccggtctctgatattatttcattattattcgatccatttgttacgtaccccgcatctacgaccccaaaaacaacttagtctgtcccgtgtggcgggtgttcggacgagtactcataacacattgttgagagtgctcatacaataattgctttggttttggctttatgcgtatccttttctatctatgctcatcaaatcagtccttacacggccctaagctgcgcgactctgtatgcaacaattggcttatccagtaaatgtccctatgactgcccggcgctttaccggaacaaagcctttagccttcttcttattgctcatgtggcttcgcttttcattagcttttgacagaaattaggggtatggtgaacgtattggtaaatccacgatgataccattctctaactaattaaaaaacaacagtggtccgtttttgacaatctggccggacacaattaataagcaacaatgcatagtctaaaatcacatgattcaatggtactggactcggtaatccatgtggtcagtctgtttctgacagctttcgcttcagggccacagcgtgcgacagtgcgcgtcaccattgaacacatctcgatgccagtcaggatcaccctaatagtccattatgatacaagcgcgtggtgtaatcctctgattaacaaattcgaagattgttcaaatcctggcgggtctgtcggtattgattgtagttgtattacacgcatgaccctatatctaactggggatttggagtgcatggtgggaaattcttggtaggaagtggtaggatttagagatatcggaaggggtattggtaggtagattaactaaaaatcgaggtactgtagttgtgcaaattttgtcggggcgcatcaacaacgagaagcggtgtgtgtgaaccgaaggtaggtcggaaggcacggatcaccttctacaagttcgagctagatttcttttctctcactccaaacgtctccttctcagggcctttgcacttctcgcagaactgggtcaatatgttaagctttcgtaccttgacttctctcacctgtttgacgtatttcgctttcctgggaggtaatgtgcagactcgtggttcccagcttggggacagtatttctaagcgcgaggttctctatgttggtggactatacatgggcatcacagcaaagcaagtcttcattctgaccaattctacatgtatctaagatcttcacacaggacaatgtcgttaattctacatcaatggctctggtagggcaaatttacgtcgagaagctttcccctaagccaaccccggcgaacccaccacttcccattatctttattgggggcgcggctcagaccggcacgaatttccttgataccccagacggacgaccaggatgggcatcctatttcatctccaaaggtcacacagtttacctctcagaccagcctgcacgtggccgctccttctggtatcccgaacagggaagtattgggtaccttggctcccccgattctgtctctgatattttcaccgacgtagcaaacaacggcaaccaatggccacaagcgaagcttcacacgcaatggcctggcaccggtcgcattggcgactcaacattcaacgctttctacgggagccagatacagttccagactgatcgcttcataagcgaagagcaaaatgcgcaggcgtattcagctctagtcgaccttgtaggcgactgttatatcatcagtcactcgcaggcgggtgcatacggtatcttcagcccagcactatgactcgctgaagtgattaacgattgagtaggctggagggtcggagacatgcgcccaggcctagtcaaaagtattgtccagctcgagccgtttggtccaccgttcacgctccgcccgccgtttggaaatcgcccagctttcgctttcggtctcaccgaccttgcaatcggatacgaaccttctgcaggcaagaatgccgaaaatattgagacaaccatcgagccagcaatcgacgccgaccacgacgagtccatcatgcagaagtccccagcgaagcagttgacgaacctgggcaaaatcccacaacttgtggttacaggcgaagcatcgtttcatgcaccatacgattactgcaccgtcaagtacctggggcaagctggcgtagacgttgagtatgcggatctaagcaacgagggtattcatggcaacggacacatgtttttcatggagaagaacaaccttgagatcgcagaccgggtgtaccagtggctgaaaaagcactaatcaacgcataatcagagtcaatttcctcactgcgttgtctcatggtgtttgcacttttaatgtaggtcattgaccgccaggatctttcttccagtgcatgtgaccacactgtggctttcaataattgcctaatccagagatttgtgagcgctattcgtgaacttgactaatcagcgaagtcgagagatcccttataccaagtttgcaagcgatgtcaaagaacttggctcgagagataagtccgcggatttgagcctcagtatttcccatatcaaccccgaagactcgacactgtgctagctccgtcatggttgttgggtccaagccctcgagaattcgtcagctgtatgctggtgatgtatgcgagcggtcatcaatcagctgcctctctttcgatagttcaattcacacccgtttcttcgcattaggcatcaacttttacatcagccaatatgcgcaatttttcccttacagcccgaagcaatttaccgacctgttggcaccgatttggggagaagaaggaaggtatcacacacacgataagtcgttcgttaggaccacgtcatcctgtcacttctaaggaaaacacaacgtataagtatagagcacattttctcgttcgatgctctaaacattgtggcaggataccagctgcatatactgtgcgaccatcctcgcgcaagggaaggctcattgaccccgaccctagttcacaacagaaagcaaactagttagcttgagcctccgagtctacaataagtactgacagtgaattgatagtggtgacatctaacggcgtatcggcaatcatgcgtctcggattttgcaagtgccgttgttgagtcaaccatgaatagatcacattgcgaaaatgtggaaaactggaaaccggagcattcttgtgacatagtatctttctgaggccgccataggccggatagacgtagcggcggcttgccactcgttagagagcgaaatgggtctcgtgcgagcaaaggaaaacacaaccgcggatcgggttctagctagtgttctgtcgccaaagcttgcgggatgttctaaatacctgatatacaccaatagcacctcctaagcaacaaggacccgttccatctccaggatgactgctatcaagtctggcgttgtatctcgtgtctgaacctttgcaggtttttggaacttcttctccgaaccacaaatcaaactccttcatccactgtccctttggccgacactgagattcaaatcgtcggaacacttaacaaatcatttcacacctgtttattgcgagatacaagtcaacaatgtcgtatttcaacatcaagagattaaaactagtgagtagatgtcatctgaatttagattgcaagaaccattccacttccaaattgtacattgcctcaatcccgtaaagaactctctgggtgtgtttcggcagcaacagaaatcggtctttcagacctacgaggcgcagtcttggcaaagaagcttggtgcttgaagttccgtcttgactacgttcgacggcgctctgactttgggagtctattttccaggaactccaatagacggcgaagcttgtccacgcgcgaaagtccaccgatacagataaagaattcaatggcgacgcggttcatccggagtagagattcatgatcctgtgaaagacggtggacagcagcgtggcggataccagaaaccaatctttgccaatttttgtatggtattagcggcttggcggcaagagctgcactgtattttgtcccgatgtttcacgcactaaaggtatattcaatccttgtgcctcccttagttttctcaaccgcgacacccatatttctgagagtctggacaaactcatctagtgagccagcaagcccctgcggagagagaccgtgtctgctgttaggggcgtcgatgaaaagccaaacccagttctctagtgcagctggtttggagaacatgatggtctgcatgtttcagctgccaaatttggcctggagctctttctgcttggcatacataatccggggagctggcaggacacgcccttgcaaatgtataagattgtcgccaaggttgattccgaagaagactagaatagaaagtgattctgtcatctgctagcgtcctccaaaataatgactgtctagaacattatgcccttctttgctactcctaccgcgccactgcgctgctcatagatagctggggctaacgctaaattcttgttggaaggtgttgggcgtattaagttcggaacgctgattgggctacatgttcgaagtaatggctcagcaatgttgctttccaaatattttatttagttacttcaaggcccatcactgtccagatccgcttgtatgttaactgttaaacttagatactaaatactgctgatggcaagaccaggaacagaggatcgtttcatttacacaggataggtaggttctgttggatatcgaaatcaaacacctctatcgtcgctagttattagttaacgttatctaatcactctatcttagtttcgttcctagggtagaccgccttttaattctgcccccacattctacctaatgtggacatcgacaaacatgaacactcatgtctatcaatcacgcctgtctgcctgcacgcgacacaatacataatatttggtctacctaccatgcgcggcgaagtacgtgctatttctttgccgctcagtgatggccgcgtttattgttcccctcaccctgtctatttcccaaccctgagacgcaaaatacaatgggtctcgctgtgtggcaatcaatacagttgcattagatcaagccaaacccctcatatgattgaagctgatgtactaattgaatagatatgtcatcttcaccttggccaggctggtacccagttgggtaacgccgcctgggagctgtaagtcttactgcttttgtgacccatctggcgatgtttaaccgctcgatgaggatatagatatctgctcgagcatagcttgatccccgatggaagtatagatcccgatgttagccaggaaatttgccagaggggctcttatgagacctttttcaccgagaccggaaatggcaaatacgtccctcgttcgatctttgtcgaccttgacccttcggtatgtaaagaataccaaaggcttgaattaaattggggataactaacatattggcggtgatatagactatcgacgagatacgcactggaacctaccgccatctgttccacccagagcaattgatcagcggaaaagaggatgcggccaacaactgcatgacaccctaatatcggaaatccctgtggtcaggactaatatgtgatagacgctcgtggccactatgctgtcggcaaggcgctgttggaggatgttattgaccgaattcgccttgtggccggtgtgcagatctaatacccccttgattcctgacctcttcagctcatcttataacagataattgctcttcccttcagggattcttgatcttccgctccatcggcggtgggactggctctggcttcggtgctttgttactggagcgtctttctgctgagtatggtaagaagtccaagctagagttcgcagtctatccgtctcctagcgtggcgactgccgtggtagagccctacaatgctgtgctgtccacacacggtaccatcgataactctgaatgtactttccttgtcgacaacgaagctgtttacgatatctgtaagcgcaacctagacatccctcgccctggatatgatcacctcaaccgtctcatcgcccaggtcgttagctctgtcacctccagtttgcgttttagtggtgccctcaacgtcgacttgaacgagtttcagacaaacctcgtgccgtttccacgtattcactatcctcttatttcatatgctcctgtcatatctagtaactgcagtggccacgaaagcttcaaagtcaaggacctcaccttccagtgtatgtactctcgtgtctttctttttgaaaccgtcaatttatacttaccgtttgacaggctttgagcccaaaaaccaaatggttgtctgcgatcctcacaatggcaagtatatggctgtcgcccttctctaccgaggtgatgttgtgccccacgactgcaatcaagctgttgcttctgtcaaagccaaggcatctttcaacctagtcgagtggtgtccaaccgggtttaagcttggtattaactaccagaagcctataagtgtgccccatagcgagcttgcatctgttgaccgctcagtcaccatgctctccaactccacctcgattgccgaggcttggagtcgtctcgatcacaattttgaccttatgtattccaagcgtgcgttcgtccactggtatgtgggtgaagggatggaagaaggcgagttctctgaagcccgtgaggatcttgcggctcttgagaaggattacgaggaggtcgctaatgacactatcctctctgatcgggaagtggatctagagtactgatagtgcctatcttcctattgagcggtattattaggacctgccgtgaaatagttatttgttcgtctagtaggtcgaattcagaatggaattccttatcagtctccggattcccaaatctaactagacaatttgctaggactgcaaatttaaaaaccaatgccgactttgccgatgtgctggccgctggcaagttattttaatgagtcaaagacctcatcaagactgaattgccaccaccgtagaacggttgtgtgtagcaaatgaacttagtcgcatcctccatttgctcctttgagccgcgtgataccacgcacgacagctcccttggccaaagcaagatcagcaacaccaggacctcctcttgctttgcagcaaaagtgaattcgatgattaaaaccaaaccacaccacggaaagcaatagcatcaagggactgtttgatagttcccgagccaccctccaggataaagttgacgccctgtccatcgatgatcttttgagcctcagttgcccaggcggggttgtcttgtagttgataatgtagtaagcatcgtactgggctttaaggtactgaaccttctcgtcggaagaagatgttataatagtcctagcacccgcagcctcaatattttgggtggtcaagtgataaagacctgtcatccaaggaaaactttctttgcacaagctttacgacctgtttcaagaatcctgtcccatctatctcaaaacaccgcctatccagagtgccataaaatcgtcaatgtccatttgatttgccggtatggaagccagccgttgctattcaaagccccgagacgcactacaatataagcccgtccacactaatggctctgtcgacccaaaagtccatttctgcggcagcggaattctgctttgctttattttccatataattcggtgctcttcatcaataagcaatgcgatcatagcattggtttttcctttatccaatctcttttgttttggtacttctgctttttgccattatttgcttgattcgatgaaacagctctttttttctttcttctttctgttcgaccatatcggaattattctgcacatatgggggacgtccatatcggtcttgctcttagagaatactggtagtgggaaagtacataataataatattattattattttagccttcagtcattctgagaatcacgctggctgaggtggtctgtgccacttacttgatcacctggcctagggaaaggagagaacgagtgctcattgttagggtgtttggttcgttggctttatgcagcgtctcactctacaatgcccacagaagtgctatactatgtcgggggaatgcctgatacacctatgctccatgattgcatccatattttacgcttcgattttggtttatccgctgtcgctgtcgctggggataaaccccgaattcgtcgaagctccatccggcttccaggcctttggatgctgcccgcgcaatatgttccttgtacttgagtttcgtgtccatgaggattcccaagatattgacatggtccttgggctcaacggtttgtctcttgatagtgaaacacccctgctccggtttgtaagccttgggagcaaggtgtatgatggctgttttgtctgcttcaaaagtcgctccgctccttttctcccagtcgagagcttcattgagagttgcttcaacgccttctcggttgctctgggtgtcggccacgccaggctgcgtatatctgctcttgcaagagcacaagcgcctgctccgcagaccgttgctttcaggctccgaaatggctggtcgggagcaagccgtgtgtctccacaacgtgcgagatcctttctgctaccacggatccaagtatcttgcccagcgtcgcgaggagcgaaattggcctccatgcaaaggtgtagtttctcttgttcggctttttgagcggtatgatcttcgcgtgtctccactgtgtcagcaacatgccttcttccagtgacgcctgaaacaagtcgagaatcctgtgcttgaccgtgggccaggccctatacaaaagtgcgaatttcttctaatctatattctacattctatatggaaggatctatactgactgattcatgcctgatatatctggtataatccgtgtattcatgcatgggtttcaacctatcaaaaggaacgccgaatataaacttcttgcttcctgctacctctgttccttgtcgaaatggttgtcattaacttgtgtaccgaaagaaatgaacatgacgatgggtaagagtctggaaccaagcgaagtaccactcatctggcttccaataggggttgaaacaggtcgtatactaatgggtctcgctctttgcgatggtcccagccactggcgactatcgtcataggcaagccactaggcagcgagatcgcgaccctaatagagaatacccttctggataagtcaagggcttcgttggcggcgaatatcgtacttgcatataatacaagctggacatcggcttttccggagatgttttgaatgacgcgttcgtgttagccatattccatgatcatacgaagggtacccacccgcatgcaacgaccagcttcagggcaccaatacgtgagcccctgcgtatattatgactaacacaaaggtcctgcagcaaagtaggaagtgagccattgcgaggaataagcgtttctccacaaagtgccacacgagtgatatttaccgtacgcctagtgccacattagagcctttcaacttaaatagagtgacaattacagtggcttcccttgcggagaataagcttgccatgagattgagaagtcgtagctcacgtctgcccagtgctcagatgaaagaggctttacgttgataatcttttttattgaggaagccggcgatactgccggtcggccagactgaaagcctccaagcaatgacgaaccctcctaagaatgacacattgagtggatgacttgttcatagtctaggaaggttagccatggtgattaatttctcgctgaaggtgtcttgtttgtccaacaagccttctttagtggttgaatatcaagcgaggccttaccatgacagcggttttttgacacatctcgcaatgggaacgactcgttattggggatagaagagaagtttaagtcaaggttatggccttgggtcgctgactcggaatttggccactgtgctggcacagattgtgcattcaagcttctggtagctaaagagatctggccataggagtgctctgatggtggatgttctgggggggtttgagctaaggctcctggggatgcgagcttcgttggtgcttagcattagtgcttttgcgacataaaccactgatccaaaaccagtaagatgtttccttgcggttcagacctttggtcgacctaccttatttcgcacataggctcctcgcatatgaaagatcgatcactagtgtggattctccgatgacgggcccgacttgatgactgcatggagcccttagtatttgggcaaaacttattcaggatcattccctcacgtctgcaaatgctttctgacagcccgtgtagccacagacgtgcggcttttcacctgtatgagtgcgtatatgtacggtcaaagcactacgttgtatgaacttcttattgcaattttttttcggtacaatgataggggcgttcgttagagtgtattctagtatggcgcgagagatcgcacctgcgatcgaaactctgttagagttggcaggttaatttgggaaaatctgagtggacgttgcccttcgaatagctcgatcgaaagaactgaccttgtcgcagtgaccccaagaacacttgaatttgcgcttgctggcaggagccgtaggaggaatcgttgactgatacgccatagtcctttttttggaagcggatatgacggccatcgatcagagtgaatagtaaagggatagccggcattcaagctcggagcataacatggaaagcaggaaaaaaccagctgagaaaatgggagagataggagaagaagggagattggatctactgctatcattaaatgctagccttgaatggaagtaggcaagatgaatgaactttccaccgacgctttcaatgtccggtctattcccaggccgggaggacaatggtggataccaatagactcggtgcggcgtttgtcagtctataaatccctctccagcacgatatcccaaccaacatcctatgaccaaactgaccaaaaatggactatcccacgttgccttccctaattagccggccacccaggagacagcgtcgggtatcgcaggatgcagaagatcagtccaaattaggaacccatctacagcaatcttcaaacggcacaaacatcgaagccaaggtcggtcatatcctcttcgcaggaaacgaacaaaaacactaatactgcgcagagtccagtgacaccccgtgcccttacggtggagtttatgaaacttttacactacaatgacacactcgttataccagccctcaagctgcttgacttgtactcttccctatgggaatgctacgtaatcaaatctgccgagaaaatgcaatttgaggataagcagcgacagcttcttgaatcaaatgagtggctagcaagcgacagcgacatccttctgcagctctgcgatgaacaggcaatggagttgcgtgatcgaaagcttgcgcttcaggccctttgtaacggtgggttcagccttgcaagcgagcgatccccaagcctaccatgttgatgagccttgatgaggtctcagagttgttgagcgcccatgggcgacaataacatttggatagctctgacatctatttgcgttctctccgaagtatgatcgctgattttagaggaggcccatgcaaccgccggtgagtttccgttgggtttggtgacggggtgtcaacgtttcacgattgttgatacatccgacgcttgagtttcgagaagttagcatcaggccaccaagtccccctaatctgccctgaccttccgttatcgaagatagataaagtcctgctcaggttgcggcattctgtccctctcagccccgttaaatcgctgctttacacacttccatattttccctacagcgttcgacggccagtcatataccagaaatgaacggattggacgagaatggtctgtacccgtttctttgatgggagtttgcgctaatgttaatagaccacgatttggatctcgaccttcacgctatctggtatgaatcttctggcataccgacaccgcctccctgtctagttatgccggtacgagaaatgtatatattggaagcatgttcgtgggaggtaaggttggtgacgacatcgcaaaatacttgggacttagagatgctgttggcaaactggtaaaggaaatcggcgaccccggttacccatttccggatccactacaccactggtgttgtgtataattgtcatcgactacgtgtatgagctagtaggaaagccaacctttggcttgcccccgtttgttaccatcaactacgagcagaaacacggcatttcaggaagttggaccatgcaccgaattggagtaacatctaaaagtgatgaccagatccacgaggctggtgagaccttttgtctattattttaacctctaatccaatattgttttctagcgcaaaaatgatttaacattaagtctaatgtatctctatagcgcaagaaaccatatcgaagatgccgcaagcgtaccacgtacttgacaataattgccagcactttgtggtaaacctcgccgatgcgatcttgcgagatcctcgccacaaatacttgtccgttaaaggccaattcatttctgcacatgaaattggagttcagcctgagaggagcgagccaacacaagatgaacaaaacttcaagggcaagcaagactttcaggaagacggagacatcgaggaaggaaaccccgtcccaatcaccgatcgagatgccgagggtgctgttattgagaacgagaaggaacgcagaaagatgatgttgaagtccatagctgacttcatggctgataacactccacttattcaggaacgcgaggtaatttatcagtagcgtgccggggttagacactagatctttttgggctttgctcaatactaatataatgtagtaatacattcgttctacttatgaaaaagacttgtatatcactacctaggtaatagagtaactatatatgaatggtattgggagcttgtattgagaaccttgaaagaacaaaagcggatttttagtgttgctgatcgcggcgagtccatacatgtcatgtctggccctgtcgcaatgtcggaagagacgtgatgcggcggaatgacttgacagatcgtccgccactgctatttggagaagttttctcacgagctcggaaagatagattcaaaatcacctgtcattgtgacgttagcgataaagatacattgcggaatatccaccaggtcattcatcatattggtgaaactggtgcggatagagtagaccatagccttgatgcagtatatgagctatgattttagattagtaatcggcggcccatataaattgttagcaaagtcgatacagcaatacagagagttgaacaccattgattggaccctacattttacaatacggcccacgccgacagatattcctgtatcagtattaatacagtgacatactcttaagttaatacgttgctctgtcttgtaattgaattggcgacccaagaaactagaacttcccataggactgcaaacaactcaagccccagatctgggagggcctcgggaatttggtactgtacctctgatacagatgggcgctgcagaagtggagaccggtcttagggggttgaattaaagcttatgtttacatggatatttgcatgtactattcctattcgggccgccaccttggcatggctgcattacagccagtagataggcaagatacaagtcaatgaatactagtactggtaccgatggaaaataaaggggaagatgccacggtagcttgaaagatgctctgaggcttgagttcataacctgtcgacaaaacgataaaacgactgaattgaatgatgctcaagatgatcaagaggatcgtctcttcaccccttcggtaaggagggataggacaattctcaccattgcaatcggtaggcgagatcacgtggcgcgagtcgatgacatcccaagcatttgtgtgaccctcaggtgcggtaaattccccactccatcggttggctcttgacgttgccattgcagttcatattccccttggctccaatctttccatcccgggcaaaccgggcaatggaatcattaatgatatcaatcacatcctgtcctccaactgtaaactgcacattcccatcggtcttcgtggcctcaatgccaaacgcacaagtgccgtcggacaggatctcacggtgtgggtgcccgactacctcgtgatcgaagtcggtcgaaccgtcgccctcaatattccggatgatcgtctggcagtcagtcaccaagggcgaagcacccgtcgtttggtcgatgaatgacgagtcctcgcaggtactcttccccggggggatatcgcacgggtagttgtcgctacttcccttgtccgtcgtgtcccacgattggtacgcgcggtcagcgctacacacgggaattcgcatgaacccaggcgtcgtcacgtcaacatcgatcatgttcgatgcggtcattcggtcttccgggtccgccactggcgcgctgtttttcttgccgttgtcgacccaggtgcgtacggaacctttcacgagctgttccttcgtgaggccgccgaattgaccgtccttgagagtctccagccccgggggaactgagaacttgttgtcttgacagacagtttggcagggaccatggtcgccgacgatcttgcattcgcacttctcggcactgtccttgggatacacaatgtagtactgattgtcatcgacgcagacgcccgtggccgccgcgatatcgtcctcgaggtagtcgccatgctggttgccctcgccgcatgcgtggcctgcgttgatgatgaaagtgtaggcatcggattcgcgccagagggccgggattgaccaaccgaagatgcactgttcaatgttggtggtgagagtgctcgtctcgttgtatttctgttcgtccggctcgccttcctcgtatttgccctcgatgagctttccattgcgcatagtctcccacatgacgtcgagcgactcgggcgacccgtcgaagagcttctttaccgacatggttgccgttgcatcccaccccctgatcacctgcgccatgtaggcagagaaatgatcttgatcctctgctgtccaatatgcgtcgtcctccgggagcacatccttggcaattgtcgtcccctgccccaccagcgtcatgacagtatccttggtatcctccaggctaattcctttctcccagaaggccgcctgcttcttcagcatcgtgttgaagaacggcccggcagtaacgagcgtccccagcgtcagcaaatcaatcagcaggaacttccacgaatcatcctctggcggcggaaccggggcaaaggaattctccatatcatccaactggaagctgaccagtgtcgcggcattgtaaagctcatcccggaacttcttgaacatctgctgcatcttcaccagcgagttccagatgagctcggccgcggggccggactcgggcgcgttaaatccattctcgcagccgacgatcgggcactctccgaggatatcctcacactcaatctcgctccccgtgcggagcgtcgtcgataccgagtcaatgaagctgaccttgtttcgcttggagtcagtgtagatccagatcgcctcgacatcctcccatgccgcaagcgcgttcagcgtcttccaccgttcagacggggtgtagtcccacttgtctttactaacgacgtgcgtgcaatccatgtccgtccagttcccatgccgcgtatagttcgtcttcgggtcgttgccgttcaccaccatgcgcttgtacggcttccagtcatccaaggggcccggaggatcattgaatttctgcaaatcactggcccagtccgtggttcctcccaggccccaggcaatgtagagcttggtacgggtctccttggtcgcagcgctcatgtacccaacccactcgatatcatcatagaccaggacgtcgctgttgctgctcgcgtccacgtattgtcgattcacgcgactcgggtcgctcaggatttcttcaatctcggcttcggccaggtacccgcctgtcgcggtgcaccgccccttcttcgcatacgatgtcagccggtctcctgtgaactggcactcggggccccagcagtccgctgaggccatctggaacgcacgtccgtagctcgtcacgccaaccacgaccttatccccgggaacgccagctttggtgatcatggccagcgattggcgcgtctcggtgaggttgacctggctgcgcagacagttacccaactcacagccctcctgcgcgttggggttatgtgcgtcccactgcccgtggagatcatacgtcatgtagacgatataatcgaccacacgggagatctcgcgaatggggaactgtttcagataccagaacgaggcgggcgccgcaatcgccaccgatctgcccggcagcaggttcttgagaatcaccaggaacgccagatagttcggcccgtcctcctcgcttcccgggtcgaagctaggcagatccggcgcgccagggtattcccagtcaatgtcgacgccatcgaggtcgttgtctttaatgaagttggcgatctttgtggccatgttcagccggttcgcgggtttcaccccgttacggaagatctggtacgtctccgggaaggtggaaaaatcccagccgccaaaggacaggatgcgtttcactttggggaggcgtcggaattcgttaaactggtaagcggaaagctcatcgcccacggtaacatcatagttctcgtccagcaccccgaagccaaaatgtaggtgggtgtacttgtccgtgtcgatctgcgaggcatcctgatacagacattcacgcttgaagcagtacccctggtagtaggccagcttgatcgcgccagtaccgtctccctttacaatatccatgccacagttagagatacagccgtacgtgtccggctccgcggtgccgggggcaccggtgttggtatccacacagaaatccggggtaatgccgcactgaccccagatattgcagcaggcgttcagtgggcacgggttcatatcagcaagatctgttccgtcagtgggcggctcagatccaggcttctgcgggccacagacggcgttggcaatcgggtcagggaacggtggtgaacccttgctcaggcacatgatggtgtccttaaacagggggtcacaccccgaccagccccaggtgttctggttgtattcatccagctcgtccatggtcagggcgtactcggcgctgatggtgctgcagtcttcgtctttctggaccttatgcgccttgcacgaaccatcttcgttgggtatgggacggaaatcggggaggtcgccggaagaacagcagacgtgctgcttgacccttagcgacgtgcagaagtctgagccagggttatacttctgcaagtcagagacggatatgccgcacttggcagcgaggtccccgcatagattacctgcctcgacctggacagtgctgcactcgtctgctctgtggatcagatacctggccgcgaggctgggggagccgacgctgtggtttgcgctgctcgagctgagaagcggcgtgctgaactgcgccgtgccagcaaacgtggtggagccggcatacgagagacacgtcgcgttggtccaagaccgcatggccgtctggatcgctgagaaggtgccattactggtcaccatgactccgaaaatgtgcgaggcgtcatactctggctgacagagctgcatcgccaaagttggcgatgacacgttgaaattggcaagattatcttcaaacaccttcagtgccgactcggtcagcccctggttcagcaaaccctgtccaatgtatatgcccagggtagccgaaccggactggccgtatatgataaatggattgtcgtcggcagccccgtgtccgcgatcaacatacttgcggatctgcttgacaatcgacttaatcccggaggtcgcaagcccatagccctcctcccaccaaccaacctcgaattccacgttgaccgactccgtctccgccgccgctatccgcatcgtctcacgggggatcatcgagaaatccggcccgaaggacgagcacgcctggatgcggtgggagacgcccgcctcgtcgaccgggtcgtggagagagaagtcatagaacatggtctggtcgcatcgtttgatctgtcggaaatcgccatacaccgaccagttcccagtattgggaccggcaacgctgcatcgctcgggacagagggagctgctgccacggtagccgggactggcgccggttttggcaccatgcaaagcatcaccggtggttgccagcgccagcaaactggcgacgcccagggccgcttcgaatagtgaccgagccaccaccattccgacaaggctggggtaaaaaaaaacgaaagaaaaagagaggaaaaagagaaaaagaagagaaacaaagagaaacaaagagagatcagtattgaacgaaagattaaaagaatgaacggttgaagaactaaaaacaaacaatgagtgacggagggtaaagggaatttttatcatctacgcccatacatactgaatgggcaacgcttttatacagcaatcattgtacatcccgactcggcccatctcgatcgctcgaatgctcgtcccggacacctcgtgtaagcctggactgtggccccggtaatccttctctttttacctttgctccgcctgattgttacatcgcctcattctcggacgacccaagcgagatgaaatccatatgaagactccttggcagacatgccgaagcacccggatgagccatgcctcggagcgcgcgaagaaactcccatcccacctgacgaaaagcaacatgggggccatccttggcgcaatattagccaagattccagcgacgtccagacagggcatgcgttgcatgttaagagatagaccgggacgactaggatattgactcgccaccaggttttgggggcgggtgaccaacaagccaccggcggatggatgttggtatctcatttaacctgcatgcgccaagacattgatatttgatggcttacgatggaacctatcacgaatctaagaggttggtatttccggggcaccgaatcttcgcggatcccaggtacgggtggagacgctagcctactgcccaagccaggcgggtcctcaccgggcgaaaacatgtggttgagaggtgagaaaataaatggcttagggtatactactcgtcacggctgctactactactagctgcgtccagtagcgcggccgacacgaagatgcaccgggacttgcgaagaaaacaagtgaattggaaaacactatctgaaggccaacgaaagaacggcaaactccgtacaatggcagtaggttacaggaaagcaccggctcagaacggcgcgagcaggaagccaacggccccaaagactgccaggaaacacgacagtccaacaaccaccaggccctgtgccgcattctcattcacagggcagtcatcgggaggattcgcgctcttgcacaatctcgcttgccacgaggcctccatgctctcgaccacggcctcgctgacatcgatgcgacagggattaggcgagggcgtcggcgtgggcgtgggcgagaaatccaccaccgcacagtcgcggccgttggaccattcttcgcccgcggggacccggatggtgtggttagtgacggtgatggggacggcaaattcatcggggcaggagtctcgcgccgtgtccgtgacgatgtcggctggcgccccgtcttcctcgatcgtgaaccaggtcgaccaaccggtggagttggtgatcatctccgcgcgcgggaacatgctggtgttgaagagggcaaactcgttgcagctcttccagtggacgttccaggcgacccgccagcggccgggggtgcggaattcggagaagtaggcatagaagaaatacgggtctttgctggtgttgttggtccagtcgatctctgtcggccagtgcacgatatcgctcatgttgttcgcgttccggatcatgaacgagatgtccaggtcgacgagcggcgccagctcggggttctggaccccaaagactacggggaaccactcggtgggcgtataagtcttgttgcgggggaagaggaggtccgtctcgagcatgcctgatgcgtgcaccataatggcccccaggcaggtggcgagcatccagctgctcgcttgggaagaaggcatggtgtggggggagctactcgagaccgaaatgagggaatgcccacaatggtcactcggggtgcaaaaaagcagcaatttactttataccggcaggcccggacaaaccaggggcgggcctggggcttgcttgcatgattcaggggaaactcggttatatcctagcactaacgcgcagtgcagactagagtagcgctgcaacgtctcgtgcgttagtggtcttggctgctgcgtgagggcatcgagcggagtggccagcgagggctcggcatgttggtagcggcacttggcggctcggcggtccagggtgttgatccccccagactcgatcttggccgtggtgggctgtatgccggagtaagcgaagccgaggcaccaagacgcccagccaatgttgcttgggtcgtttttgagcctgtcgcttggcacccatctggtcagcgtttagcctccacgaggaccgaaaacaccacccatctccgactgcaacccgtccatccgtcgagccctccactggctcaactattctcgaaccagtagggaacgcagggcgccaccgcacgccaggatcatgggttgtctccgcgacgagccgagatgtcccccgatccaggcccaggtcgctctggagaggtatataaacgaggcagatatcggaagaatccctcctcgtatcacacatccttgtcaagaaactctcccccgtcccagtcaccatgcactttccccagcttcttgtcgccggactcgttccggccgtcgcctcggcccgggctctgtctcgacgcgccgtcgattgcagcttcaccacaagtccgtccagtggtgataagtgcgacagctttgcgagcagttggggtctcacggtcgacgacctgaaggccatgaaccctggcatcagctgcccgaacctcgacaccagcaagttttactgtgtgatcggtacggtcactggggagcccgagcccaccaccaccaccaccactaccaccgcgccgaccgtcactaatgagcccgccatgccgggcatcgtcgacgactgcgacgggttctacaaggtgtcgccaggcgacgaatgcgacaccattgctaccgaacacgggatcagcaaagcccaattcctggagtggaacacctcggtcaacgaccgtaagtctacttatttctcccgggtctcactccttctatgtcccttccccatgcaaagacagacccctcttagcaaaggcccaagtctaactaacgctctcccgttctccaacccacagaatgctccaacctctggctcgactactacgtgtgcgtgcacgttcccggcgccgccactggaccgcagccgcagatgcccgggatcatcagcagctgtcagaagttctacaaggtgaagtccggagacagctgctacacgatcctgcaagagtcggggacggatctgtccaatttccggaagtggaatactaagattgatgcctcgtgcagcaatctctgggtcgattactatgtctgtgttagtgtgtagtctgttgtcttcacggatgctgtccagtcggctcggtcgactacaactgtgcattatgttggtgggactggaaccccacatgccaatacatgccacgaccgtggccccgataggattagttcatatcaacactcagcaaacatcggctcagtttagcctctggccccgaccctctcgtatttacccaaattacatccgctgtagaacgggagggacatctggagggacacatgacggagtccatccataaataatgtagatactaattccatgaggcataccgtttcaagtctgatattatggaatctatgttcttcagtccgctataacggaagcaggagcatatacacaattagaggaacttggagacattcatgtatgtatgatgttcaacggaagattttataccagcctgttcggtgaatcatacccttccggacgacccttgggccgcacaggaagcatttcatcaacgacacgtcgtacttcttcaacatgcctgaaatagacgccgtacaacttaatggaagtaactggcaggacctaaatcgtctggtggcccaaggacggttagccttcatccacgacgacgacgactgatgatcgcgggaccgcaagtgtgcctggctggccgaacgatacgcgggatctgcccttgactgggtagtcaccgcgtattcggaccacccggaatacttcgtacattacgataccttcgttaccgaaacgcgcaacgccttcggaatcgccgataacaacaccatggccctcctgagacatgaactcgaccagctccgatggagcctcgatgtcccggtggtcttcgccgagtttgaccagcttacccagagccttggcatcacgagccacgacgttcgggttctgatggtggaacaaaaactggcccacttcatcagaaccctgttttcccagcaggtactatctttctccaattacgaaactataagagaaaggctcaactgcatgtgggccagagacccgaatagaagtgccgcctcacacgccaaagccaagaagccacgatgtggctattgtggaaagaaaggacacaacgtcggagaccgcagggcgaaaaactagtcacgcaccgctaggacgtgtggacgccagcgcgtgctcacgccaatacagcaacagcaaagccaggagcaagtgaactcctggctgacaaataaagtcatcgaaccaatcaaaacccccgcactcacgaacaacctcgccctggtgtctaaaaaggacgggcgtgtccgggtgtgcgtcgattgtacccccgccaatgaagtaacgaaagatttcgactggcacttgccgcgcctccaagacgtccgatatcgcacccagggtaaaagctggtttgcgcgcattgatttggaggacgcgtttttccgcatcggggtgccagccagatccaggcaacttacggcctttacggttggggggcaaacatacaaattccgacgcatgcccttgggcttgaaaactgccccggcagtctttcagcggttcatggatcacggactctcggagttcgccgatgcaatttggtacatagatgacattttaattacagccacctccggtcagaactcggctgaaggaaatgcgctgcacagtgaatgaacaaatcgatcaccgagcgccgatctctgcgaatcggaactttccgcgctctccgccccaatcacaaaagcagaaagaagcagcacagagcggcccaacgtggaccgaacgcaaggcaagcaacataacaaatcggggcctgagcaaaaggctcgagcgcacgaaaaccaaacataagagagtcctcttcccccttacttttccatagaatctcaaaaagcggttattatttcctgggagctctaaccacatttgtcgggatacgcgcgaggcatacacaatgggtggagatacgatatgcgggactcacatcgcatctgggatgtatacgcgactttccccctacaactgggcctcaaaatccgagaaaccggcaaataattcatatagcagtgtagcaatagagcctaggggacccacttcagggttgaacataccacatgtcgtatccagagcattcggtcttgaagctcatgaaccctacccctggctgttcagacatcggccccgagtttgatcgcctgaaggacgtcagggcgatatctctcaatgcaaaacgtgtggcttttgtcgaaaaggctcattcatcgcttcagtcacgaggacgtttcaagcagcgggattgctacaagaggtctctccttcattatgctgctatggggaactatacaaacccccttctatatcttctgcaaagcaagccggttgttgattctcgtgaccagtgggggcggacagcactctcctgggctgctgagtacggctcattggctgtagcgaatattctacttgagcaaggggcaaacctcaatgcctcggattatgagggtggcacaccgttggcatggctgatacacgccggcaaccctgaaatgataaacatagcggctactgaggcttacctaagagagaggggcgcgaaagaaatcaaattgagaggcatcaagtgggcctgggttagggttttgagttattctcgtttactccgatacattcgcccccgtatataaggcccccgatgaatgggaaagccgtttctatactatatcaatacgtatattagatggacgtcataactgaggcagccggaaagcactgtggcgagaggttgggccatctgatttcacactcatgttttctttcgtgtaaatttgctctcgttgaagtagagacaaaaagcaagcaagtttatttgagcataatagatatgccgatatgtatttcattagtaaaaaccctagtcttacctggcgatacagagctgtaggctaagggtacacgtactcgtttccactttagcccgtagcgaggctggtacattcgaccccgaactgtctactagaaggccttgacttcatgattctcgtactggccatattatctaccgcttcaagtaaaactaggtcttgggaacttcgttcagtatggaaaaggccctgagcgatgtttgggagcaggagaagacgacatattgattgtctattctgttgagactgtaaaagcaagccggcttgttagtaaaataaatagaaacagtgatgcgactataatgtgtgtaattatatatatatatgatcacaaaatatgttgaacctacaaatccactcacattatactgtctactagtctcaccattaaattataataaaagcaatatatctaataaattatataacaagatacaccgttattaggttcgattacctactataccagtggttatggcggtaggtgacagtgacagacgtaaatcgataaatccacaagttgaagttgaaccccctattcaggaaacttacataatctgagggtggcatggaccgatggcaaggcctagacgttgaccacctttttcaccgcccgaccattcaccaccacgctcatcactacgttcatcaccacaaacacacacatcaactcacacatcaacacaaatcaccactcacatcaccacacacatccatacgggaggcaccctgtcggcagtatgggctattggaaataatgccatttgcaaagttcatcattggagccccgataccacctcagaaagcgaaaccatcaaattcgttcaaaaaatggcaccccaggtacagtacgtcccgaaactggtgcaaccgcctacatttcgattgttccacaaatcctagttgccaagacacgctagtctatatcaagagtttttccggagtatccttgtcagcggggtacgtattatttggtgcgaatagtaacttgacatacagcggaatgtattgtaatttaatacaagtgacaactcgatacccatcttgatactcatcgccccttgcacggagatcttgaacgattaactacagtaccgtgtggcaagttcgaaactaatcttgctatttgacgaatacaaccttttcttttttttttgagatttagtgcacaccttacttaatgtacctgatctgcttcttagtagtatttaaaagctgaatacacaaacccgaaatagtctagctgctatgtctctcagtggtattttatttgatggtacgtatgtaagtagctaaagttgaaaacggaattccgtacctacactcaacagcttttgttccatccgtgctttaaccgaaccaaaccaccttatttcttgttcgagcgctttgttgctagtcagtatttgtttcataatcgctttaaatagctcgcttactctgatccgtcacagtgacatctctattagcagcaaagaccacatcctcagaaagctgccaggacctagtagcataggtcgtataaggttcaatactaactatttttccagtgaaattctttctagtctcgccggggcaaagtaaagtcaaagattcatcagtattattttcatcatagagtgtcaatttcacatcggtctcatttgacactgtgatgttgtcgttgataaactttgctgtaggcatggtaggagtcaatatccgtgtttggtacaacgttgtaagggctcgatgaggaatccgatagtgaagcagtgtcttgtggaaattcatggtgctgctaaaaatcgttgcgggcattatgggtgggactccatatatattgaggtggattctaaaacgtcataatgatcatcagctgctgcatacagtattgaaacactagatacatgatgtatcactgagcgtaaagtaccgtattgataatctaacaggaatattgatactccgggcttattccaattacggtatagtatatcttggcattagggaataagagacaatcgaagagtgtaatggttgcaccggtttcgggacgtactatacctatacctgaagtcatcacttcttgggtcgatggggagcgatcttgaacacatcaactcacatcaccacacacatcaccacacatcaccacacatcaactcacctcaccactcatatcaccacacacaccacacacatcaccactcacatcaacactcacatcaacactcacatcgccactaacggttcaacgcaacaagcattccaagacaacactctcatctctgtttgcctacatctgaatggaagatgccaatttctttgtagcgaggaagctattggattgcaagactatcaagggaacggaatgggaaatacatcctttgatgatgaagacgccttcagtttttacattatgattttggctattgaattggcaaagatctaactaggactccttctatgtatccaatgatgacccttcgggacaatgaacagatgatgaagatgttgcgcaggtctttgcttctccgaatactcttggaacactcgaatactggtccctagcaccacgaagaggtgcctgcacgggctagaggcgcttgttgtcgcagatgtccctgcgaggcgctttgttgacgcagggcctaggctgcagagaacttggtaatgcagcggtctcctgcagagaacttggtaatgcagcggtctcctgcagagaacttgttaacgcagcggtctcctgcgaggattgttgttgacgcagacctatcctgcgaagcaccctcttacatcgctgggctcgtggcagcgatagccgtagccacggagacgctcaagcccgcaggcaagagagggacattgtgacacagcggaacatcggaatgtgaggactgaagtcctgattttttttggactgggaatccagctccttttatatttctccggctatatctctataatggaaccacttgtgcagatggtagcgagaaccactctcgttgataagcgttgaagcgatttgaacgatgttgaaggggtgtttggagactttgtggcctacagagtcaagcctcgacctggaataattcctcttaaaattgtgcgttgagtgtggtgaaccactttcatcggatgttaagaagagagtaataccgtaaaagtatgatttgtacatatcattgaattttcaaagaaatcgcttaacgcgcttatatactacgtctcctagttttaaccactgttaccgtttctttcatgagggttgaagtgcttcgacagatgccgaaataatgggctggagatagccgacggaaacgctgtgctgtacctgcggttggccggaggaccttttggtctcactagaaccaatcctgtctatctttaggcttgcgccgctgaatgttatttctttcctttctacttatagctgacttaggttgtctttactaaaatctctactccctgggcgcgtaggccttggcatacttgcaatctcaggatgaagattgtctttctttggcatgatagccaaaaagggcccagacctttgaaaagctcagataagaaactgggtctagtttctaggataaccatgtgaactgatacaactaaggcccacgagctaggctcttgtgatcgccaccccctcgcaagattgtaacgctactatcacactgatgagaccctggagacaaatagcacccgacgggctaatcaaacaccacgcgagaatttagatagacacaggtagggttctgcgatacagatcttagcggagacccacgggatagtagatcagggaggttctatttgtggagagaaaatggaaacaattgcaaaggtccagacacgatctataagcctaaagttggccgctgttagtatccgatggaacgggagattgttgcctaggaggtactgctggggcaggtgagtatttggaatagcacgtagactttggcgatataatggtaagctataacccgatccgtggttgtgttcttggtcgcagttatgagaaggtaagttcccctatcaagtggcaagctgaactttgcctatctggtctgtaggacgttctagaagctacgtatcttctcctgcaataagcctttctccgatgattattgctctctttggactataacaacacttcctctccatctctttaaatctaccgctatttcaataactctagcagacggtaggctacaactcgatccgtggttgtgttcacttggtcgcagtgaagagaaagtaaattcccctgtcaagtggcaagcagaactttgcctatctggtctgtagaacgttctagaagctacgtatcttctcctgcaataagcctttctccgatgattattgctctctttggactataacaacacttcctctctatctcttcaaatctaccgctatttcaataactctagtagatggcttgtaaagaactataccaattatggacaaaaccacatgagcttaaataaaatgcctccgttttactaaaaccgattggccctggacaatatttcgatgtaggccggccctcctgcggccctaaaccttatttcaatcgatctgcacatcttgatcaagatgctgaatttaaagaaactttctaataaaatgttggccttaccgcagtaaatttatcctatataccgcccggcggagattatattgtttctattctagttctcattttttgggctgtaaggttcagtcacgaacagaccagaaagtgggcagaaacctaggcttaaattcttcattaaaaccgcattctctcactgagcgagcatttccatagtttatcacaacaaactctcgaaatgatttatagtcccgttcgtggttccgcagtctgtgtcaaacttgatttccttgtgacttacgcgtgggtcgaaagcagatcggacgcttcattccaaagatcactccgctcccaaccaccgatccaattaaatccaagcggacatgtttccttaggctaacaaaaacccatatatttttagtcttactaccctgtcctatctgcttataggaaaactcatagtactgtgaatccttatacactatccgcagtattttgcaggccatataggccatgcccctggtttagaatgacaaggacgaaactatgtagctgggcctgctcagaggcaccacgatcatactcgaatgttcaccttgactttggaactttcttactactgttataattccaaataagggtgattgctccttcctatataaaatccatggagtgatttatatctcttatactaatattcattgtcgagtaagcacagcctttatggtaataacatatacctggactattttatcgaaatagttagccactgttccttcgatatagcaatatagcgctccgtcgataatatactgctagtgtagacattctgttcgcctgtatctcagtttcctagcggtatagacacgatgtacatagtcctacatctaggacgacgatcgtgttctttgaggtgagtacggaagcggtgttagcgttacgcagcctatggtaaaaggtcagcctcttatataggaagaataaaagtatttcatacatattttcgagtgtgccgtttgagctggtttatcgctgtcgccagactggcaagggttagccgctagaattgtttgaaaccatttgttaatgttcctttgggtagaggtattgtctggcagagttaactgtgaaccgatattgactagcgagcgctgtatatcacctaggcgcttttgttttcctgaacgaccggggactttggcgctagtacgacgctgcttctgcagaatatagtactttttcccttataaagactcaacgcttcgatccacctaatattctttataatatatgtcagagagggctttccacgataggccccgatgggaatccagccaagagagaaggtttttctcttcctgttctagccagctgtatgtgctacgtagggacatagtgatgctcgggtaagttacaaaagtgggaagaacggttgaataaaacagtagaaagtgaattcgaagaggaagggttattgagtttaaaagattatagtattgtacataaatatagcgattgcgtttatgagccatggcctagcttagtgaatttataccagactcttatgactcgccctagcttaagtttctgaagtccagaagccttcaacttttgatatactatatttcgttaagaattaatcaataacgttaaacagccaccgtatacctattgataatatcatatggtttcactggttcgttgaaatatatcagactcttagtaagccatatagtaatcgaatagatatctatgtatagaatcagaatgcatgggtgaaaaatgtgtgcgcttataattcccgttatagtaagtaagcataacacttaattctagtcctgcgatataacttgctataaagccggagtgctttcttctatcacacttaaccagaagtaggaatacttatcacctcagtgtaactcagacgcagatataggcggaattcgaaaagcctcgcgccctcttcgatgaccagactttcggagcagattgcaacgtatattgtctttgttatccttagagtctaaggataccggcagtgtgtctagtaccgctatagaggatacaataagggacgagttaccttaggaagaatacgactctggcgaccaggaaaatagtgacatagctgataagagtgagtaagaagctatacgatagcagagaactgtatttggatataaaacggacttggaaatacgtaggcaaactcagctatctagagatagcaatacggttgctcttgaacgcctgatagagtaagtataatcctatatggatataattaagaattggcctgctaataatatctagactagataaccgaatagggtcagctgctgtcgatactaagtaagaatgtaaagtactaaccgtctctgtaggtctattaagcgcttattgtatgaccaagctacctagaatgaaactatttgtaacgatctagtcgatatcttaggccgattggcaatcgtcgagactgaggtatagaagttgaatagataaggtacaaataaatctatagagggccagaagaccgggcgatccctgcgtcagcagcagtgatgtgacccaaactgtgttttgatatctaactagatattccagagtaaggtataaatctgtgttagtcttaagttgtagatatgattattttactgactgaaaatattactgaatatagatactcttattatagatactaagttggagggttactggaaaaggtctgattaacctaatacgagctggtactagacgagctatatatagtttgtcgttgtatttaggtcttcgaattttattaatacttgcctaggttgtatatactaaagctatcttacccgagccgagtagctatagtcgtgacctactatatataaacgagtactttaagccttttattagttctactattgtagatgatttgtactatctagtctagtataattgtatacggtttatataactggaaatatgccctaaaggctaaagccacagtagtatataagaattatatgctatataaagatgattgtatattggttgcgactattaaggtgcaatccttcgcgattaatactagtagagtagtttaatatacctggtagttgagcaattgctatttgtgattgagttagattaggatatactacggcaagctttagattaaggaatgagaagagataataactatagtgcgtaagagaagcgggggtttctccattagacctatagtaataaggcctagcattgtcctaatcggactattaagatacattccctttacatagactataataaatatcaattccacagaccagtgtgccaaggtctttcccatttctaaagtgtatctaagcggtgtgatactaaatctattccgactgcgtctccacaagtatcagtcccacctacttattacatttcttaatgtataaaaaacaattaaggagtctggaattagtcggcctagagagtggtaaacctgccgttaacctgtgccgaatactgtattgagacgcctgtgcttactcgtactagtggttcttagaccaaggcgcccagcgatattcttcggagtaagaaattggtaatatatatacttcgtaatcactactcttagaatggtttggtaataatgttgcaggaagcctattcataagctatctgtgcgttaactctattaaaaaggcaattctatctataggaaattaagacccagtaagtctaacgcagatattcgttcaaatgagagatctgaattggttggtcgcagacggctcctactggctaggaagtgggacattcaattcagagaggctaaggagggtattgtggccctgagtaactgggccgctttgctcggcctagtccgcgtggatcactccggagcccggcaaataggatgccagttatctgttctggagggcatcgattgtattccaaaatcgagtggtcgtcgataccatgtccccgtgtgcctgatctagaaccagctgaatatcattctatggtacctaatcctatagagcggtattcgtagactctagctgctgctgtaactcacagatcttgtgcctaacccgctgactgttagctaatgccgcatctcttactgctatagccagctgcaatttcgaagtttcttcggttttctcggctttaggttgttctagcaattggcaatgtttatatctttcctcttctctctcctcctgtgctttttggatctcttccttaacgatacttatcatataaagatatttcctataggacactttattatgtttccgcctagggtttcgtgtttttgtgatagaggatgcctagtatagtcagttagaagtacgttaaggtagttactagggcaataggggcaatgttagccaaggaaaatccagaaaatattgtagaaggtagagattggtaccgtatgcttatgcaacccagtcgccggtttaagagggttccgattgtgtttcgatctagactgagtagaccgaaggggataataggaaggcacagcacgcagctgtactttactacagtggtctgcctattcccagaaagccttataattctttgccatactaagtgtactcgattgtaagatgaacaatagcgcaacgagatatagaatattaaaagtaatataagaagtgagtttcgagaagctgaattatatagtacgaggagacccaagtgtaggacttaaatccgaatgaaaccgctcttactcctgcctaggacgtatgccaaataagggttataatcctaagaaaactgagcactgggcattagtgcgaacgtacaaaatacctaccgctcaattatagagggtgcgagctataggtccgtataaatatatagttgttacatacaaccctgtcttataatagaaaggaccaatcggttacatcccatctaaagtgtagagctaagagtaaaatgtcatctttcaaatgttttgtgaagtttgccgactcctaggactatctattagttagccctagaaaatagcggcgttgtctttccgaattaacagttctaagtttcctgtccctatacgtctagattccttaataagccgttacttgagtcacaggggagaggcatttcttacggctaagacttagtagtaagggtatcaatctagtatccaccatagtatagatatgcttagagggataggaacctctagtgctacgaatcaagcggcagtcatagcaggtatataagcatgttataattatcagtttaagctacagtataggtctcggccttcactagttaagagttctgctatcaagtacctaactcgagactcctatagctcacttccctagtagcctacgtttatagtctatagatactatatatcacgaggccggtattagcttaaatctagataaagttggtaccaaattgtaaggtgtattattggaggtatatattcactgttgcctttaacgcataacaactagggtactcagtaggctattagcgcatatgggatctctgccgcgtactcccgttaatccaagatctcgctcgctaccttatagatgccattggctaacgattggatatcgcgtgtactaacttcgatctcaattccctccgtttataataagtttaatatccgccttactctagcgattcccgctttcgcctctgttaacttattatacagtttcttattatacgaccgaagaatttgtatatcgtggcggagttcattagcctcagcccagaccgtataacttttattaagacagtcatttaatcgggcataagtgcgttccaactcgatttctatgctactattagcagccttaagcttagaaatctctgctataaaagaaccatccattccgttactaaaactctccacctccaggctctatcagcaatgctgtatcaataaggatatctagtaatactcacctcccttagaatacagcttgtatttgactataagtgtcccaacgcatacggggaaatagcctcgattgaatggccgatcttattacaaattttccggtaaagataaatcttaccgctacttaagctagatttaagtatactagcatttgcgctcatgacggactaagcgtatctatcttcaggtcgcggttggagacagacttttttaggagcgactatgatgccaagtcggttatctaggagtattagctgagttattattagtagggggccacgggtatatatattggccgctagggcttcttaacattgctgattcagttttaagcgcttctcgttactacgcttaggtatcgtagggtaccttcagcactcaaagaatatcaagggaatagggacgcgggtatttagaatataattcggaactgacccttccgccaaaataccggcttaatataggatcgataattcgttctttctcaagtcgaaagtggtatccgtaagtggggcctaccagtatccattaacatagggtaaatgaagtttcagctaacttagattagttaagatttggttgaaagtcgggtataacttttattgagacctcattaagtaaactgggctactgaaaaaaacacaggaaaaagtaacctcaatttctattcaaatatatcctcaatcactaagttttggtcggcaaacgctggaattaatttggttagggcgtctttgcgctgccaaagatttctgccttctaaggtgccggcggaactgatagtaacttaatagagggtggaaagctgatacaactgagcagactgtcgggctcgctaacaacatccccaaagatccagcaaaacatatatataataggcagggttggggcgactctatgtcttttgtgccatctatctgttaaaattgcaatgactccaacagctcgccggccccgccgccaaagactagccagcgcccatgatctgacgccattactgtgcgacccctcaaagcttctgctatcaaagatgatcactcgccatgccggtcgtaacattcgcactgactcatcgagcccaccttcgcagcgagccaagaaggttcttgaaatgagggttcatcatcgatttcatggctcgcacgttacgttcctagaaggacagcctggcagaccccaaaggaaaggtgccaaagaaaccccacgccggaagggagcaaattcgcagcgagaggcaattcgattggattggatgcggcgacttcgtcccaagccccatagacgttgctagatcggacaaggatagggcagacatgaagcccagagggtggcatgccgcaaccactaatttcgtcatatcgttgaatagattaaattgactttcaagacactgaggatgacaatgcagtgcgtgatgaagtagcccgtagaaatggactctatgtaggggattgctcagctaggcatcctatcgattggtatacgcaaaaattgccagtatacaaaaggatattctctacgcttttatgatgcctgttgtatacaattgcaatacaagtgtctactgtagaatagtagaattcttggaattggggcgcatagaacgggccagaagaaatgtacggatttaatactgattggttgcacgatatgtgtgccattatccgtgccgttctcgaaattatatacagagttcaatgtatgtttctacgcaagggactctcagaatacatattcttcaaagcgtgtatcaccaaattgctctgagagagatcatgctattctacatgcactgaagtaaggggaacggagtttacgctgtagccagagttcatggggcgtcatcttttatttttctttaactaatttagacttgaaaacgatccgttgtgtgattgattcttgcggatattctatcttttagagacagcacaaatagcaacctgtcaacaaaagaaggtcgccattttactagtgcgcccgaagaacattcagcaccccctctgcctgatgataaggctctcaacgaccttactaagcccatcccctatttattctgcactttctatagtatacaagaatcacactctcaagtacccgattggctatgcccgtactagtccgtactgtaacgaccacgttccgacacaacctcctggtttcagtgatcttatctgagtcatccgtccagtggcatccacataccataagctagtagataagaaaggacccacctatttggctcacgggattgactgcaaggacaacgcccagatggcgataatgaccagttcgacctatttagtgtcagcattattagtataacggtataacgtgggaatccgcgattacctccaatgcaatcatccacaatctctccaacataccaatgacagcaatcacaagcaaaagaagtgctattgcagagagataacacgagatacaccgcaacttagctcgaccagcagttgactgttaaaataaacaccaataccatacaactacacaaaggtaatccgctaagagaatatagaggctacccagataagcagatttcaaaaggaaggttccaacgtgagagactactattttcgccaaagctaaagccacagagaaagaagggcatataaaacgcagtaatcgaggtatgagtgggttttcgcgctgctggaagattatgcgaatgtacttcagcattattagctcaaaacgaagacactgtatataaccgagttcggtgtactatcaacttaccgcttatagtggtgggaatattggtataatccaaaagagtacttgactctatactggaaacctattactccagaacaacctagtaaggatagcaaaggaactataagacaaggcatatagcgctaaatcgactttataccaccgccagcgtgattagatacaatataaaagaaatagtcttccaaagttgagaagtagaagaatagtcaccaagacggatctgatgatattttgtgaaaccacaactatacttaactgccagttaatatccttatttgaacgaggtcttgagatttatatactgtgacagagacatattggctaggtaatagtggataaattcctaggatatcttcatttggctctaggattttcttatactgagtttcctacctataaaaaagcagctgccctcaatcttataacactaaaggttaactgaggattctcagttaaggcttcggggcaacactcttactcttttactacgcagacctgagaaagactacatttaaagcttacagtatagtttctgatttaacttgcattatataagaccatatttacaagggccaatcacagttgcagtatcctgcttttatatagatatcgaggatatgcagaggtagtatatacatttataaatgcctaactcaatttctagagagtactgccattctctcaggactcagtcttcggacccgtagaaaaagtaaagtatgtgctcgctacaatatacctggaagtcacacaatattttaataaaacagctttacctttaaaataactggaattagctatagagtacacagtgtcttgaatgagtatatcctaggggcagtttttatataccgcggattctccgtatcagtttcagtagcctatggttgcctgccctagacggactcattagcttattgtgattactccttaggccgaaaccataactaacccttacttaagacctatgatttaataatgttttatcatcggcaaaatttaatatatatctcctttccaaagggtactaggatcagaaaatgcggagactagggttataatatccgttcaccgtcatgatagtatcttgctattcgtcggtactctatataacggggacaaatggatagctatatcactaaactattaaagtaagcgaaatatactctatttatgggttttaatcgcttataattttcactggcggtctaaagtacatatatattgtattggccgataagtagttattctaatagcgtgaagttaccatattagcaataatatatagactatatttccattttctcacttatatcagaaggttccagataataggttatataaggtatcgttaattggttcctataatctatagtatacaatatgcaaataaacgtcgatagatgtgacagaaatacttctactatttcaggcaaagtcaatccacttagaatgtaggactttttaaatcggccacgtttctccttattcctcgaaaaaatatacgcagactttcctaactaagaaacgaaagttaataatataaagaagagataataataaaatcgaaaacagtatcgggatcaccgcgacgcagacatttcatatggtgaataagtcatacacttgaatgttaacggcttacctagacagtagaccgggaataaaccgaacgatagataatatgacatgacgtttcatgtatacgagcctttgtagtccactattactataattccatacactcgatatcaagatatataaggaattgctacctataataccgctttagaatactctacgaggctgtatatcaagattaagtatatactatagagactgggctgccagaactagaccattccaattttcttaagagggcgcaaagtgtacagagtataaccgcagaggttgagaaatactagtctgccgaatacagtggctaatagagagggagcgtggagcagctcggccaatatatgaatagacggtactaaggctaacaggaccactgaggtaaattaaagagacaatcgggcggaaaatgcccctatatccatatccttgagatagccgtccgagaggcttccaaccgcgattattataaaagccgatacacacctaagttatagcaatggttaggctaggaagagaaaagcgatcgtaggaagagcggcggtccagaccaggaataaaccaccaaactatacagaatcttgctctttcctcattttctccttttagaatacactaaagcaattctgaaagataatatacagatactatatagcacttcctctactaaacgccatcactgttagagcgtataggattgactgttaagataaggggaaatggaagatcaagaacataagtagataaatgataaagtatgagaatctaagcgtgcctataataatacctatggcgcagttacacaggtttcggtaatcgagcgtatccattatatagagttggggtaagtaccggccctcttaaggcagtatccctcaggcgagcatttggctttatagataagagtagagctcagtctttacttgttaaccgtgggttaggtattacaaaaatatatatattagaataatgataggtacaatgttaatcaccagaacagtaaggaactattatatctgtaataaccacccaccttaacggccggcgcctcagaagtgaccatatttatattatattactagaaactctttttttgcctcattaatattcaatctaaccaaccgactgacagtcctccctaactatataattggtctctcttattatacaaatgtaagacctaagagttcgtgattctacctctcttccataatagcactatggaagatattatatagattgtacgctagatcggttaacaacaagcacataatatatattatcgcgattgctattccctctttaagctactctaagagcttacagaatatacgtttaccgaactacaaagactttacaaatccggcactgagcgctcaaccaattctatctatcaacttctccgaaattatcagaatataatctataatctagttgaaagagtatgcgaagcctaagcggaatacaaggagttctgctcagtgaatgaatcacactcagcacgcgttgtcttcgagcctatcaggagaatgtacaccgacccacaagcctcattgcagggtctaagataatggtagaactactatcctagtatcgtcgcctagggagatggacgagcacaactggttactctactatagagatattttctaaggcagaatttctgtaattctgtatagccgcgtgaaaatcataatgtactttatataccacagtatttctctctaaaagctcatataccatataggagcccaccaatacaaagatacagctatcaagaagttccgattaccacagaatatatactataaaggcgagcaatgtttagccccactatctgctaccgtccttatatatcattccttatacactcccagccgaatgacaatctacgggcttggcaattagatacaacagtagaaaagatggaccaaccatatggtggaactactaatagaaaagaacactgctaactatactgtggtaatcatcttagctctaaggataactttaacgccgtaaggctgcagcgtgttcttaaccttagaagcaaaaatcccatatatcaccgtgaccgcaattgtggcagtcgtaatcagtatcgaggaaagcttaatttatcagtatgtctcttcaatatttgtccaagtatcacataccgtataaaatatggcaagtgatctgctgccttttgaaaagaaaactttgcgataagccaaaactccggataatatggttaccacaaacccagtaatatacaaatagaccacactctgggaaaaccgtcagtagccggaaaccaagcttaggtcaatatctagaagtatgttactgagatttatagatatggaatcaagcacggcggatatattaaaagtaaaagagatgctagggtcggaataaactatctccgagccatccttagctttacagtagctctagaggccaactaaatagtattgaggcagatatgacttaaattcgtgtacctgggcttcgaccatactgctggcagctgacgttgccttatagattgcttcatttgcgctagtatagatgctagataccacacctttaacggtatttcttcccccgctctcgatatgcgcagtattaatattagataggtcccgaatttgtaaatcacgtagctttagaaattcttttaggtctacctaccgattgcttagcattgattagcatagaagtttttcgggcgtatcttacttttagaaaatgtagacccttcggcgaggaagataacgaacatccgataaagataagagatagatagactagaacggcgacggtaaataacaatgctgtagttaaaactagcgaatccaatctgctcttggtggaaagctttatagctttagaaaggagaagataaaggagtgtctcttaaccgaataatagactttgagatcgagagaacaattgagaactatactatatcgcaaattagggaagcatttatataaaatttctagatatagtcaacttaaccagtgtaggcagtattctataaatttaattgagaccggcgcaattttctgcctcattctataggcagtagtagataaatgtactgtataaactaccagagtatcgggatctataatatatagtattataagggcaggcaggtaattaacagtattaatcgccggaatataagggtatgcaattataagtgatcaggctggcaagttagatctttagcctacaattattcttagatagatttaataattaaggtggtataaatactactgtacagagtgaccctcgatatctaagttgtctttctcgttattctatacaccttctcgcctataaatcgcagctgacttatactagcccccgttatatcattttctaggcagtcagaagttgaatattaggaacagaaattatatgactatcgagaaagttattttaagctatctaccagagtgtatatctcttacctcatcttcgagagtaggttcagaagacagatggacggccggcagaatatctgtcgattgacacaattgataaagatataaggctgtcaacgcctaataagggacaactacgtgccggtaatagtccctagggcttattggtaagaccgcgtgtggccccgatctagcggtagaattattcctagcttggatatagagctggactataggttatgcgtatacgaccacgagaaccttataacagctgtaagggatttccttagccataacgatcagtagtagattgttgatatctatctaacggataataaggaaggtgcgttacttagttttagctctcagagatcgtcattaataagtttataatgtcgctagacgaccacagaaataaagcggagtctattcatcacaaattcatccaatcgctaaaggagcggtatctaaatgacaatcgcctacctgatagactgatctacaagtggattaaccggtacaaaggctaccttaatatacctagggatccgctcgctacaaataactggtaggctgtactggaggccctagcgggaagtaagaaaggaaagtattttaaagcaatttttcaaacataagaccttataccaaaagctaaattctttactcattattctgggtctctagggagggatacggattaggctactttataaactaacagctatacattgcaataaggtaaatttactctaaaccacaaagctagttctatctcagctaacttgattgtaaatctagccagtagtatgctactgggaattgatcttctccactttttcgagactggttggaggaagggaagagcttttattactaattgacggagttacggtcgagctgcttcaatctcacgtccctaaaatctcctataaagatttgcaatccttataagtcgagttggaggagggctggcttttcccgaacttctcggaagaggctcggcaggacatataggtgcgtttaaaagagatcgattatctaattccaaccttgaaaacattttttaaagatcagctctatcttaaggtagcttaaagtatcataaagagactgttcgtccagctgcgaagggaaaagattactattaaccagggtatatatgggaagtataatactccggttcccatttcgatgacactgagataggaatggctgggatccgacctactcgaattttagcacttcagcttctagtatagatttgaaataaccgatcactaacgccttaaatagccgatagacgctaatctcgaggatatgcttaatcgataaagctccggatcgtctttcccccctaaacaggaaatacggcgccatttctttacactggtaagagcgagaggtttctaagcacctgttacagacaacacgtcagttataataggggagctaccttcccctagagtatacgaatacctagaagacttagccgaagaaatagaagttgcgaaaagatatggaaagccatactcgaatactattgaggcagatcgattcgctttatccgcagagacgctgcggcaaagtcaagccttagttcgagtaatagcggggtttctccgacagtctatttttaaggcgttctttggctatctatagaatagtaatagttaaatagccggtagtgatcctcctaacgataacattgaagttcactatcgcagcgaaaggccgactaccgcaaatattggtcgggctataatagccacagacggtatagatatagatcctaggagccttaggccaaaccctctcgtcacctcagcagcgcggacgcataatgccgcagctactactttaccagctaatatactgccgccgttcggtatcatgactatcacagttggaggaactacacgagtattagaccaaccaatctacaacttatttataaaagacttttcgactggtctatttaacaataacttcaacgtctagaccgataagagagaaaaacgatccatttccctatatacgtactactctcattatctatacaatccgtcgtcggtgctatacgccgaatttagataaaataagcatactacctacgctattatactctcgcaaatcggtgcggggagcaagagaaggatacttaataaagacgagcagatggctagagtagaaatatagttacaggagcaaattgcgttactttcggatcggtgtaacggtaacaaagacctttaataggtaccaaactcgggttttactaaggccttaaagaggctcacggtatagaggaggcctggtatagtagggatagtataagtgaggcatataaaaattcatatgtggttaatctatcatatctcggagatattcatctaaatggtaacgttttaccttaaagcgagtaagcctatagtatctatcttatatagcgctttagggatagatagtaatgtactttttgatttagtgagataagttatagttcgatcaaatataattagacatatacttggtgtctagcactgatcgttatttatattttatagcctaaacagcctgacacattagatagtaagttctatagcccgaggaatctcaatagcttcaactattctctgatttatatactcttcttctatttaacacatagcgttatacttgtagttcactctctggccaccatcaaggattctataccatatggcgtcgcttcaagtttaataagtgaggtgctgcctcttttatctcaatagactatggtacactccgccgactcaaatacctttactaacccagaggcgcaataacaaggaccacccttacaatagtccgcctccctaaatatataattagacaatacaacttaaattctatatcaaagagtagcttacttgataaggcaggtatttaggtcgagtttcccagaaccctttagcgagggtattgtagtagggctatatatctcgctaggtacacttagggataccgagatactcgcaaagcttaatatatgcgggagctcgcagctagagcttatagtataggtagcagacctagtactctcggtactggtgcttatctattattaagtgctttcgcgtcttatagtctctttattcagtagtggcaattgatataaataattgccctactattacaagggaaccttattaccagctaacctttctatatattaccttaccgaagctatcaggggaagttgatcgtctagggagactgcaataccacgataatcgatagaaggactattaatacctataaaggttagcagttaggtataatacgagggtagtataatacctatattaactaagtacactttctatcttagcctcgcagttaggcgataaggaaactaattacatatatctagaagttgaaagcgtggcattcaagcttcctcctatagcttggtgctatatactgactgtattatatatgaatggaatgaggggcctaagatcaagggcttaaacctgactaaggatagcgataactgtaagcagagacctgaatataattaaataactttagtatctaaagacccggctttggcgggtagtgctgcgaagcgcttttatattattaaggctcgatgagtatatttctaaggtaccaatttacctaagaggcgtggtaatcctatgaaagtaaaagaaatagagaagaacgacgggtggtacattattatgttggcatcactggcattaaagaaatgccgataatattaaaaattaatgctagcgggagaattaactcttaattttaggacagtatatttgtgcccgtatggctcaatttaagattctctgtatatgaagctataactttagaaatatactatttctaagacctaagagatatatattaccctcgatcttcccctctttaatggactttgtctatttccaatcaatatgatgagggccggtatagattctgctagtattttgttactacttctcgccgttttagtcgtaagtggctgtatattcgctctgcattatgtaggtttcatatactgactttcgataggttgtaaggccctataataacccaatctatacagtaatatccacctatctagtacaatccctagaaagcgtatctgcgaccgtgacctactaatatattttctagtattattcttcgctaatattcccactgccaaaactattgtacgaaatgatcatagaggtcggtccctattattaattgtttacaagtatctaataatcgcaatagtaaactccggcttatatatattcgcacagaattgcttatatagacgctacgacagagaatattgaccacttaagtaaagttagcgaaacctcgtgtaacgttaatgctggaaattattatcgtctgttatatactaacctatctggtatattcctttacaactatgtaagtactctaaactttaaggcaaatagggctccgtactgacggtactaagagcctcgagtatatcttaataaactgtggaagccttatacccctagcgacaaaggtttaataaatatgctaggtagacaacttttatacgtttagaataatcggcggctcttctcaaaacgcgagtgactcaattgacttttacttggtagttataggcgaaactatggggtatcctatagagtagtttagaccttacgaccttaccactaagtcggattggtattcgggatggaccaattaaggtactactggagcgtagcacggatgtgattcacatttctgtatattgattcttttagaactcttaaaattagggagctgtttttcctatatgtgcgctcgaaataagttttaccaatttgttctctttgattgcttctccacctctatttttattaacgctaggcctaatatagctagtgaatatttattacccttttcctattcgatagtaattgataggctaggctagatataggctgaggtgatctgactaagacttaggaaagaaccaaagagaataaaatagtgaaggaatttcgagcggacctgtaaagcttgtacgttagtaattccctttctttaaagtatcgaacgctatcgctacctaagaagcttcttagaatgcttggaatagcattcgccgtattgtattgtaaaatcgttaaaaaccagtattagccttaacttagttattgtgcttatgcttactgtatgaccgatgagataatacttcgacagtacttccgcctaaaatagtcaaaagcataaaacaaataatatcacgcatatagggaaggaaatcggttaattactagagcggttaaccctggaatattcaccctatttccattaactggccccttactacatttctcgagataatgctaaaccaataaagatcgaattaaatatatccgccttagggatagcttatttttagtcatctcctgcttacacacaactgcctttaataaaccgtttcgagatgtcagttcttcgagctctgcttataagaatgacaagtgtgtacgaagacgcgaaatccgttttaaatttcggtaaatagcccgactcagtcgtttcaatttgggccagccttatctctttagagttttaattttggtcaggatttgacctatacctaatagatttactaatggtacccgagattgcttggtagggaatatagtcttataattatccctctttcgctaaagtgcctgtttagactgcaattgagctaacagatacaataatatggctataggatctaggctgggacggtaaatatttggtattattgctatcaatgttcctaccggccgctccacttcattctcaacggcagtgatacgatgagttagagaggtattcgaaaagagtaaaactaataggatcatataactaatatagtatttatcggagatttggtctcgcctatctggtaacacttttgtttctatagctttaccgggattttagctaatcaattgatacctagaagtcataacctagccggtacggatgctatatgtacccacttgcgctgtagatatgttgaagctaaagtctaatatgacgtacggtagctgtcctagacttactgcgtaggactagtaatattaaatagagatcaagtattctataataactagaacggcgctacgagttttatagtataccataatatgaccgcggttaccgttatcgatctttgaggctaggccatttgtatcgctctcagtatcaacgggataaggattatactggtaggaagcagaattagaggtaggagacagtgaagccttattatgagaatggccatatctgtaccaggtcgactctgaattagaaggcgtagcgtatatatttaaagcacgactgtactgatgttgattcactgtaatcatttttactaccttactaccttaccaccttcactaccttcactacctttactgtcgctgagtcctgaatgggaaccactcttaggtatagattagcttctatcttatatacactgaacctagaattttaatattaaaatgtatcccagagtctagttagagaaataggtggtcttgaaatggagtatcggcctgatctagcaagattaatcccagataaatattgtgaggtattttattaataagttgtcaacttaagtattatttgaaaaatgcgagaattcagctgtcctaggtatgaccttcgctcttttttccggggaatctaccacttattgcgagggaagagtggttgaacctacggtatgcctatagagataacggaggataaagcagtgtataataaagatcccgatcaaagtaacactgcctctaaaaacgctgctaaatataagtaatgtgccctgctttgaaagccttgccgatagattactactatagattgctgtattgtgccttttatgatctgaggtttttgtggctgatgttggtctataaatagaggaattagtttaagagctagccagcgtgcctgttaacgtcctcgataaggtttggcttttatcgctatgggccagagataagtaatgcccagccgtcccagtgatacgattagtagtgccagaccattcggtgccagaagctctgttgctttagaaaaccctgctttatctggtttctctgatctcggaagcttcggtatgtatttggctagtcgaataatacagggactctatgaaaggtcccgatgagtccttagagtgcggtgtttctaaactagcctatacttgagatgtacgattgaatgcaaatggtaaaaaggtggctcttatagtcacgttctaaagtaagtcggtagtgttattctttaaattctcaattagaaagagactatagttattagaatcggtgctggtatatgatcctcttatggtaccggttatagaatctttttcggtaattgctccattatgcttgggttccgttataggcttatcaacaggggcgctgattggagaactggagtgtaataataaatcacagtataatggtcgatataaggctaataaagggaattatttcgagactagtgtgacgtaaggccttgattcctccttatatagtgcctggcttatctaaaaactaatagcttgagtgtacgttagttttagtgaagctaacgtcggctgtaagtcaataactgtcagtgatggtattcaaaggtaatatattgtctctgaaggctaggaaagtataagaaaaatctggaaagaggcctatatgatatatacgactgctgagcgatagctatgactttctatagcaagcttctttacagactgaatatatattgattaaatacggaaagaccagagtgtattaataagataaggaggactgttcaatatattaggtctctgggaatcgccgatataattctaagtttctagggctaggattgtggtaatataaaaggtatatagactattataatagttagttatgtctagtactagccttagaaaatgtcaattctgcacgttaatacccagccgcatatttttattcgctagactgtaatataagtcgtagtagtaaatatcgtttaaagttcctgcaaatggtaaccatcgttgaagtaatagattggacaattaggtcatcgcagatatctgatataaataattgtatctaccggctaaggtaaactaccagtctattgcagtaaattagtggacaatagcgcctcctctaagccgtgttaagtaagagcaactccgtaagcgttgtaacaatctactacgataccacaatgaattttggcttctatataggatgaaaagctagcttattatggaactgcctgatagttagatctttacataccactcctatccagagacccctccgcccttaagggaagatatagtaagacaaaattaatataagtattcgatgatttgccgctaattgtgaaagaaaacacggcttaagcccactattattcgaacgcctcgcgactatatttctgcgacctctactcagtcagttggcagagacatcccggtcttctgtgccccagttcgtcaggaccaaaaatgggaagctctggcgaatcatttgaacaataatcgccgtatggtcttgtagtaatataaaccgttttatacttagttagttcactttggtgcacagtgggatccgtggcgtatatcaagaaataccgatctcaatacggtggttaaagcaatggaacctgttcaacatagaagccgggtatgacatcggggagaatcaaaaccaatgtcaccattttatttctttgattgtttcttaaactctaagtctagtcacgccaggcctaatgtagttagtcgacgatgtactgctcatcgccctttcctattcgacggcccgaattggtctaggccagaagtagattggaggcgacgacccaaagaggacagtaggaaggctagtccggagcggataagtaaatttcagttggttgtaatacttgtcttatttcctacggccatattgggagcggatcataattctagtaaacttgggaagtttcagtattgagaggctctattcggtatatgcaaagggctaacctatctataggctgtgattggtcggtggttatggcccccgattgattattaacctcaacttatgccctcctttttgagtctcccaaccaggtgatcgaacgaggaaaaaaagttcatcttctacgacacattggaaccatcaccccgtatacgttctctctccgacgctacctacgcctaacgagcatccagcgatgtgggtggagtcgaccgtgtttcgcacttagatcaagagaaactgcagcatgacataagtgctgtaaacggaacgcttcaaaaggggctataatacttactgattgggtcactagaaaggcgatggcttcgcctcacgctgtgagtgggtagcgagccaggtgtctgccttgcagagaattgtcagcgcaagtcttcgtgatatcgtaatatatgggcagtgtgtactaccgactctggtgggaacatgattgcctttaatggcctggaagcatttctggtatatgactggccgtcgagcgctgtagggaaaatatgaaagtgtgtaaagtagcgatttaacgtgggttgggagggatggaaagctggagacggagcagtttctattcctctcttattacacagaatgaggacaaaccaggagaatttataaccatatgctaagttatcgaatgggttgaatatatcaacagcgtgcaacgggacccgtcaccaacacaacaaaagtttaccagcagtataggccttatctctccttaaggaaaacgcaaatagatagcggaaaatcccaatgccattttccctgcctcgtaaacgctctaccacatggagtctctatcaaggctcagcctcatcgacagagtaggcttaaagatcgctcgcttccaaggctgaaacaacaccattataaagagcctgaaccgctcgcttacactcccacaatactgaagcttattcattacagagctatagaaggatatcgctatcgcttgctagcaagtcatttgacgtttaaagctgtctctactcctcctcgagtcatattttctaggccgatttaacgacgtagcattgccatagacaaaagtacaagtcaagcaatctaagaactggtatagcgagggagtcattgaggtttactactttcatagactccgccataagggtaccgcgtgttctcactaggatctattcagtattagtaggggttttcattccctaccgtaggggatatgaccgaccttaggttcgatagttgtgccgtttgtaacttactgtggttggttttctaacttgggtttatcttctagagcgtaagatactcggcactgtctcttagccggacaattaataggggaaggcgaagtaggatggtccattttagtcattaagataaattggatcagaaattatgcttaaggggcatttatagctgacaattcacgtaaggctactgttatttctaccagtacttccttacctagggtcgaccgcaattttaaagccaacgaatagttagcttaaccgctaacgctcaatcttactacctactaagagtaaactgcttaggaataagtaggattaaatcgtatctacagcattaatataaaccaatgcaaagactgtcttataatggtagtctgcaagtgtacttccgatatatggatgctataaattactttcaaattatcgaagctttactgtgactacaaaccattcgaagtacggaagtgcagataatttgattcccaatattaatgtcaacaggcgctaggaatagccatctcgtatcatatcactagagctacctaaagtagatatcgctagcccttataaacgatcaaatattctccttagggactgtttcaacaattttttagtagtattatcgttataagttatgctttgaatggccttctagatacaatagtccttcgctagatccagggatctccttaaactgaagtatattagtctaggattagccacaagtgcattaacaattgagagatattcccccctgaccgccaacattaatagatcctcgaaccattaattcctcaggttaatatcaattcggctatggcgtagtagttcccagaccatctctaggtcaccgccataggcagtaatgtagagagcagtatcataggttgcgaccgtgctttcattaacatttagacgtacgccctgctgtactaagagccttactatatcgagataaccatataaaaccgctcgataaatgggtagatctattaaaccccttctattaatctccacgccctctatactcagtaaataagcaattgtcttcacatatccgtgatatatagtaacggaaattggagagtggcctacaacgcagagattcagagtaatcctaggcactgtaagcagctatcgtaaaagtttagtatacaatctcgttacggtatagtgtaaagatatagacggggccttaagtctcccacagcttctaacgaaattaacgtcgatatctttctccgccaagagcctttccgttatcttatcgtataacgagtaagtagacagctaaagtggcgtattgccatctttgtctttacagtttacgttagtaagggggtagcccaggatcaaatcgaccacttctaggcgtctgctttaaacggcaagatagagcggcgtatagcctttccagtcctgaatgtctaagttcagacccttttgcctaagacgccacttaacagtatctatcgacctatataacactaccttatgaagaggtagctcggaatcctgagcatttcgggtacctaaataaacttcacagtcgggcccattaataaacattgttcttatggcgggtctattgattcaatatacctaagaccacgccgactggcccgaatcatcttctaagttagggtcgctgccacttaaaagtagcagttacacgaatcctattcttcctgcaaagactgctaggtaaagcgccgttcgcccatatttatatttaatatccacactggcggcgtggtattctagtacactcttaacgacagaggaactccggtagtggatagcatataacagggcgctatcgcgcacttgattttagatattaatatctaggtctcgacgattgagcagcagttcgcgcatagcagcggaagagtatttcaacgcctatatcaaaggagttttgccttagtaaaatgtattaatgttagcgttatactggagcaaagcatccataaggccaacgttattgtatttaacggccaagtgtaacagattactattctgaaatctaatattgtatttccaggtactaggctgtagtctaaaatcaaggtctttacatgatttggcgagggcgaataatgtactaccatctaaatgcgacacgatccacagcaaaagctcgttaggtaggtctctgatgtttggctgtaatttattagcttatccgtaactttagtaagaaagaattggaactgaccatagtagaacagcagattagaactaggaatcaaataatttgtatataagggtgagctgtagggtataaaagttagacgtggagagatccttatatacttacctcagctaattccgcggttacctagggtatagcccgttaccgctgagaggtacctagcaatcacacagcagcattaaattcttgataacaatgtttaggcgggtgaaagaatccttggactctagctcctgggaacactaaagctattcctagtagttatcgatggccctgggaaccggatatagtctctatatacctacacctcgaatctagtgctataggcgtcgaagcaaataataatctaacacacacttcgaaacttctataggtaacctagaatttaacctagcatttgtcgactttactgcgtcccgccgcagctaacctattcgctaatatatggtcaccgcaacctacagctacaagtgcagctaatttaggcagtagtgatatagaatgatattccttctcgcaggccactgatcggcctataccggcgtatactgcatccaaatgtattcttcgacgtactaactgtttcaaggaaggcgttatatgccagcagccatacagctatataggtaaggaggctacggcgatggcatataaagctgacgagggaacactgcggagattacctaacatcaactcctatctaaagtattttctaccttttaagacaatctcaatgactactataccttagaacccatttactgtctacggaatcccttacggtggtcctatgtcctgttgcagggtaacgaagaaaggccagctgtgcaaaagctctgtcaaattttaagacaccaagatcggccataaaaggttgaccactcttactagagagccgtttgacttatcaactttacagtcaaagctctgtaatattactagagtcttcctctgcgcgagatagtaccgtcaacggcagaccgaccaagttggctagcggtggtataaagcagctatccgcaaccaggcgcgagtgccgcatagctctagagttaccgctccatccattacgtatccgggccagcgttagatatcgtcagtctctaggagtcgccctgtatcaggcaataccgacaggtcaccttacgggctcagataagacctaccggtacggctgtcaaccaaccctaagccagtacaactattcaatccatttgtgacttccacaatactgcggacgaacagtgttctatggcatatttcgccggctcaaccagcgatcctaacatcggtcgctaacatctaggctggcgtccaagacttaacgctcaaggatctcaccctgagcgactatattgacgacatccactgtgtattttgtcttaccgaggatgaagatcttgcaaataagagggtgatcttgcgctgtcagtgcaaggcgctttcctacctagcctgcgcggaagagtggctagaaaaacgaagtacgggttttaaaacgttatgctgtatatggtaagtagggctggttccgttatgcaatacccaaaatgctgattaatacagtcgaaatgaagggcctttagacgccttggttcgcccaatacgagtccaatcgtcgcatgctgagacacatcatatccacacagcaactaaatcatctgctaagagagaacttaccactatcaggaatccatcaccaaataacctgagtcagagccagccgcgtcagcggtcagtgggaccctaagtgggatcagttgagcagagcgtggagaatggcccccgtcgctcggctaggctagtaggggcccatctaccaccaggcccttctacgtctgcaccgccccgccggtcagcacgactaaattccactcgaaggtgatcttagtttacagcgaaggtgtgacgggaatgagaaattagcgaagcgactgtcaatcacgcgcgaagacacgtgaccagacgcaccgcattcggcccagtaacatagagcatagccgtggtatggagttttagagcaagtttagaaatgatgcaaatgaagttctgaatgttcgaactcgcagagcaccaaaactaaaaccatgctaccttttcatctttgcaagtactagatgctaatacacccccaagaactgtgggcagtttcgcttaattttgggatattttttagatcgagaccatattcatacccaacggtggtggccaaagaactgtagacatggatttatctcagtggtgcgtgtcgcgttaagacggagattgttgacagaagaaaacacatctcgggccggcgaacgattctggcaaactcctatgctggttatattgactctgggatttaatatgttgaatctaggaaactcaaaagcattcctaggagctgcctaccccctgggaaatacaatttagctcctggggcttttacaatctccaggaaaatgaagatctacccctgggatcttgactctacgttcctgactgagtacagactggccccgggaacacattggttagatctgggacctgttgcactcgtaggaccctacttctggaccctagagtcaatattttgctttctgaggtcgtgaaacgctctcacaagacaccctcaccagacctccgcacaaaactgagacattcgaccactcccagaaggattagccatagccctaggaaccgcacctaaggttccaggagtaggtaaagctgctaacaggagcatgactttaattcctcgaagtgggagtaaaaggccctagaagctatgttgggcttcctagggtctatttgacccctaggagctgcttatatgctcctagaaactgcactaaagattctaggagcgagagaactcctagggctaagacgtgcgtttccggggccggcagggctgtcaacaggaacttaactggctttataagagtaggaatagagagtgtacaagttacgtacgatttcctggggccatatgattcctaggcggctcacatgttccagggtcaatttctgaagagtttacggcaatcaaggtagatagatatttatacagagcacatcgtcagccatcacctttcgtttacatcaagctatttagaatactgctctaatgttggctaatatcggcggctagtcaggtcaagcgacgaacatgctttaattctaattaggaaatttaacatctaaatgatttccgcaactcagcagtatatctattcctttccaagaccctatccgtcgcacctctaatatctatagactccaccgtcattcttcgaaaatcatcatataattctgcaattgttcttatttgtaaatactcgctgcctccgtcacagccctaccatagtaggctgttagacccgcctctttgactattttatagctcggttcgtgttctctgctagtgacctcgtaagccgcatacggcaaaacgcacaagggatataataatcactagagatccgaaagcggcctggccaacggatccataatacataatcttgtaatatagaatgtggctcctgttaaaaaactcgaaagatatttgaaaaccgtggacgcggctggcaatccagccccctaatgagagaacgattatactcacgacgatttgaatgcacccgtagtaaaaccgagcggcgcagttctcttatagccactttaggtagatcacaaggacaaacccggagatggaaaacagggctaagactagggccgcaatcaccataccatcgacgacgttgtctataagggtgtagaatgtgatgtccaaaatagagtcgctcggtatcacgaggtcggatttagcacagtctcgcaggaggactgcaaagtgtacagtggccgagttgagacgggtaagggctaaccaggtcacggtaagggaagcaatgataagacacgtccgaatcatggtcgcagaagtagtcagagacattgtgtccgcagatttccgaatgtaggaaggtaaggcaggtctcatttaaggaaacagtgacaagaagtaaagaacagcagcggaatgataaagcaggtcaacctcggagcagagtaaatttatatatactatacgctctttacacaaatgctgccttaataagagatagcgcagttgatagtaaggcgtactaggtgcctttttcatgctttgttgcctcagtggcaatcattataggcacagtaagaatgtttcaagtagaagcactatttctatcttaagatcgacggccacggaaagtattcctgatacttggtagtaaagcagctctatgaatcacttcgtgtattcctaggatctactatccggtgaaacggggctactatatcatcattatctccaggacgacggattaggtatagcatatcttaagataagtggtgattctagaaaaatattcgatacagatagagattgccttggtatttttgcgatatatcactttgctatactcgaggaacattttctttactattaattgggaaagtccccacttccataggaagacaaatctctattttctgccatttttattgagcttactgtatttctttgccagctagcttagggtctgcttccaaccatatagcaacccttattgttcgttaaactaaggcagccgattaagaatcgattctgaactgtgaaatctaaccaaataccgctaataagtaggtaactaacatagatcaagtaggaattctctgtatacacatgctgttggtattaagtaatcatattcaacgttaatataaacgttgatctgaccccagtcaccacccgtataccgacaaaggtggttatccgagaatactcggtaaatatatcagtacgatactaccaagctatcgtagacgaggccaaaggccctagcgctcctagaagcacaaataagactccgccagtcgcctattttactgattttactatggctttttgtgcagctgaatcataacgcaataacaagtccctagatataggaaatgtatctcccttccgtatttttctatttataaccaacttctggaggcagtgataggtcggcgcccgtttacctgggcactaattagagggcgagcggggtaaaccaccgaggcaaaaccctataggtcctataggtagagaactacggagtatagcgaagtacaaaatactaactctagatacattcaagctagtagaaaatattcctacttatctatattagtaagttagtgatttaatatagcacctgcgaccccgagagctttaaggcagagaccacgaagcaggccctagagcgcctcgtaggcgcagctggacttaacgcaatttgagcattccgagctccctatatatatagaagtctggtagctttcaggctttcagcgccacgttttcatttattactctgaggtggattacgtatataggttagctaagtggcagatccaggaaataaaacacttacctaacaatagatatagatgcagccccggcctttagcgcattttgtgtcacttgtaagagtatcgtttactctacatcttgattactatttaaacctttatagatcctaggagatagtcacaaattataaataatagagacaaatttaaaggtatggcttttaataggtctcaattagtttaggcaccccgggccctttattttctactactaactagatcttttaagtgactagatatacctagagggctataaattcctcccctacccctttttattatataataatttgtagaccacttaatagtcgagtaggccttgcgctcaaggcagcctaagaatttcttttttgtaagtttactttttaaaacgactgcgagcttcttattagttcttaaccaagatcgtttgggttctcctttatattatctcaagctctgtctatcgaagcccgattgccgcgatggcgataaagcctacccctggctatttagatatcggcctcgagtttgatcgcttaaaggacgttaaggtaatatctctcaatacaaaacttgtggcttttatcgaaaaagctcattcatcgcttcagtcataaggaatttttaagcaataggattactataagagatctctcctttattatactactatagggaactgtataaacctccttctatatcttctgcaaagtaagctagatgttgattcttatgactagtaggggcagacagcactctcctaggctaccgagtacggcttattagctattatagaaaccttactaaagtaaggagcaaatatcaatttatccgattataagggcggcacaccgttagtatagctgatatataccggtaaccctaaaatggtagatatagcggtaactaaggcttacctaagagagaggggtataaaagaagtcaaattaagaggtatcaagtcggcctaggtttaggttttaagttattctcatttactccgatatattcgcccttgtatctgaggcgcccgatgatatggcgaaagcccattctatactataccaatacatatattagataaatgttataactaaggtagctggaaagcactgcggcgagaggttagactatccgatttcacactattgttatctttcttttatgttaatttagacttattaaagtggagacaaaaacaagcaagtttatttgagtataatagatatacagatatatattttattagtaaaaactctagtcttacctagcgatatagagctatagggtaagggtatacgtactcgtttccactttagcccgtagcggggctggtacattcgaccccggactgtctactagaaggctttgagttcatagctctttatactagctatatattgaccgttttaagtaatataaggtcttagaacctttgtttaggatagcaaaggccctgagcgatatttaggagtaggataagacgatatattgattatctattctattaaggctataaaagcaagctagcttattatgttttaaatatgatatcataatgtcctggtgctagctctgtgtactagggactataccacagctctctgacgtagggtaatatatagctttagggctaatctaattcttcgagctgaactataatagtagagattctatagattctctattatacttagcattagtcaagtaaataccatacttttctaatgtatttttaacgagttactgtatagggatagtaaacacaactatgccttaattgatattttaaccacggtagaggtctactgtttccgaaaaacagatatagctttcttactcacaaacacgtatgtctatagtatcgctagtatctttaacaaataggttagagtgatatcactttaatcgatatacaatgatctttaaagtaaagtaacgcttaatgtaaataaactaaccctaaagagccttatgccttatccttaacaagctcgatggggttaattagttagcctaaggtaggtactattcttttatatatcagataaatcccggtgacgttctattgcatttcatataggaaagggttcttcttgagttagggggtagtgtgcctttatgggcactgcagtacaatcttgccaattcattcaaaaagtaccgcctactcctatcttatcatttaatcggtgcttagtattcttcatcttcttcatgctataatagaatagaatagaagtcgctctccgtttgcttactttgtcttattgtaatgtattcccgttcaatggatctaagaggactataataaatatatgtactagatcaattccttattaataaataggcaaacctttagagagaatacagagcagtctacatatgattataaacaagagatactccatttacttaatacagaagtcgagaagctaaagttctactataataaacctaagggaaaaacttagataatcttccgtttgatcgaagcctatgttatacctctcctcgttatactattacttctcaggtaattcattgtagctactcgattcgggcccctacccgcttataccagctataacaagggtattgtatatatattgtctatagaattgatctccactctattatccagcaaaagctttactgtacgtaatatactatattgtacagcctaagagagcggcgtcttcctattctaatctaggtcatcctttactgtcctatcttataggagataaagaaggagcttagcacagtcacctattgcagtatagtgaatgagagaccttttaaaaggtcctcgttggttgtatatcccttggtatttaagcgttgcctatatattgtgaagaaacgctataacgtctttatcaaagtatatctctctaatgccttttaggtattaaaattcactattaatgatagtcatagagcgaggaggaattaccatagtgattgtaggtaccccgggatggttacaaaaaagctatataaagagataccagaggcttgtttggttattaaggaagcggaaagataggaatttctatatatatcgcgatcgtccgctttatatagcaagtgttcaaactgtacactacttatatacaatagaacgggcctatatagaatagtcgattgaataggtgatggatattatcagtttatatggttatttatttgcgtccgctaagtagggttttttatattcaacgatagatcaagttactaagggttgttggcaacccgaattcaaatttagggtagttaaaaaaggaggaggataaatagaaaaccaataaaagtggcctactaagcccgatgaataacatagctggtccgatttcgaagtttcggccatagtctagagtctatatatcagtgtccgccttaacgcaggtaaaagccccggacaattcttgctgcactggacatcagtggtgcctaatagtcgggtcttctattattatatacttttagaccgtatataagtagtagatctttgtccggggtatgtcaaattatgaccagtggcgcgctgaggagttaaggcacaattcgttgaatttttctagtatagcttaggcctacagaatataatgtatatttctgatagccagttagtttcgaaggctaaaaaataataagaaggtataatggagtccaataagattcaattggaacaaattgcgatcaatatactcatatgccttctataacgatacgagacggctacctgcgaactgatatcgcctataccagatataaaccaacatccaatacagagcgtttatagtctcagtgtggaaaaccaggagaacttccaacgctaatatcaaagcgagttttcgcgaagccatgatacctattatcccgcaaatatactcgcactccccatcgagttgctgtatgatgccctagattatctatccacggaggatttggtctcgttcgcattttgtcgataggacctgtttcaagctctgattagcttccttgaacgcaaagcaaggccatctctacaagatcttggcctcttagtcacactgttcgaggaacagtggctaaagaaatagcttcaaattatcgtcccgatctgcgctagatccgaacagccgatattgagagatcttgagacacttgtgaagttattcgaagatagtcattggctgaaagagcagctccgagatatcattatagtatcagctagacgtgaccaaccaaccgtgcacagttatgtcgagcttggatttgaagagctgacttgccggcatttgcgaaaaaggccgcatacactatttgatacgaacattctccacatgacagctttacacggaacggaaatgatgtatttataaagataatttttcttcgcgtagatagcaatatcactaggcacggcctcgtccacacaggaatcacttttgaatttagaaagaacataattgaacgcattagaaggaggccgagggagagctctccatcccagtagagcacaccactgcagctcacaagctattaatgtggctgtcaatcaaaaggctgatacaccctgaaagatatgatgaggactatgtcatgcggttggaagaagagcgcggtctcatcagtatatacggccaaggcgagatctcatacactgccgataacagtcaattaccaatggatagcgcggtcttatcagcatatacggccaaggcgagatctcatacactgccgataacagtcaattaacaatggattgcgactctaaaggtactcgacccggtgtgaacggtgtaggacagcacgtcaatattgatatcgacaaatttggaaacttggatctggatgctacgactgctaggcgctactacaatagctactttaagcacatgttcaagctccacccattccttatagaaagtgaacttaggattaaggtcgatagctttatctaaagctattgttaagttaataattcaccactaagctctgtttccagctacgctcgaccggctcgtgatggtccgcctctagccaaaaagaggcagttaaatgaaaacctgagtatacgcggcgagttattggagcctatctctaacccactacggccatgagtcggtaaaaacattgatactgccttaatcctgctgtgcctggcccttggggccatttgcgaagctcctgcccctctccctaggcccgttatggataagaagattgactaccttaactagtatatccctgctccgctggcactattcaattctccgctgcctgcaattacgatatatattacggatgctaatggtgtgcttccccctgtaaactctggcttagcggccgtatagacgttgctttcgaatcctctctatagtgtaccagcctagcctattggctaagctttcctaaacagtttatctaacaatcatatagaaggcttgttaaggagagatgttataaatacacgggataaataagggaatataaggaactaccaggctatccctagattgactctctatagatatacaaccgcaatactgggctatctgtagggtggaaatgagctagaatatattcagtgcggcttgcttgctggactttatataggctagttagcccaccctttctagagccacagttagatttcttaggtattgagggcttactagattcttgtgagaactaagcggtatgggtaacttaataagggagctacgaaggacttgtacgattttacgtactagacctgtctgtaattggagagtgaccttctcatagagctcgatattctagcgagtggtatctcctatttagaaggttggatacctattccgaaaggaaaatggacgatatttctaccaaataatcttactataccagagacgataataatactgttttattctacctaaatctatctatacaaaatcttgaatcgagtacatatagacttatataaggttgaaaagtaagactagatataatggtcgtttaccgtttaagaagctcttagcctgaacctcgaccgctggcgtgaaagtctacccgacagcatataataggacgaaagtgatccgccggtaaacgaaatcaacgctgcccgtatatatactaagtattacagtgcccggtatattatccaccgaccccttctctattatatactacactacggctatataggtactcgcgccggtccgatcagctagaattcaatggaattacctgtattctaataattgcccccctctatactatatagctccgcttacactccgagtatatcgagtgatataggctctacgctggccacaatctctactaactggcagctacctgaggtccgattatataagctgccgaagaagctgaaatctgtataccatatctgtattagttcggctattaagagcacagaggcatttgacagagtaggaggatatcggttagtcgttaccaatatctttaggactgcctatacataagggatcctctggccctagtctcaaaaatcacgaatatagaggaaagacttacatgttttctttataggcaattcagtaatatactcgtcctatctgtaagttttatattaggtctaaaggagcttatcgagctagagcaacttaagcgcctcctcgtccgtaccataggctttcttatttaaagcgaaaacatatctctaacctttcgcgccgatactcgcattctcactgagatatacgagaagatctttaataaacctcctaacttgaagcaggccactagaatgagagtcccttgattgtatatctaacgttaatagtattctctttgtctagagtaccttctgctaataagcctatctaaaatggctaccttttatggctgccttttatagatataactaactcgaaagtaaagtagggagccctaggctagtcgatttaagggctcatatacctaggtaatattttcttccgcaactgtatactaagagaccgaaaaatatatacttattgaaattcgtcgtatattcgactgcctaagaactctacagcactctgtggtactatggtcgtgctaaaccccagctagctcttaggactaaaaacggaagattaatttaaattggtattactataaatagtggtaacggatatcaagatcctcctgtggtaagaaaagactgaactgaaataaaaacaaggaaatattcaagtaatagcgatcgtatctttagtcattatttaggataaagagattagattatatttctatgagagatagaaaaacggtggaagaggaggaatagataggttgattaattatctcaaatagcggcctgctatatgtataaagccgatttagattggctggggaacggagggcatggccctcacttgtccgatagggtctgttataccagagaccatactgcgcgggactagaggccttagtcgctaattaaatatagggctgtaactaataacagctaaccgatctatctatcctctaatcatgtaaagaatcttattacccgcgaagagcactaaccgacttaggggcacctagctaggagcccttaatctagttagtctccgatagccataggacttactagactagcagcactcaagtaagtactactgatagatttgattattctagaaactgttgtatgcgagagtataacattaccggtaataacataagtattgggataagatttcggtatataagtacttatatagtttcctagcaatatgcacgctgtgttatttgctataaacagtctagatttttctatataaatcgcgatcctaaattaaaaccagaagtgctaaatcgcgataataactattaaaatggactatagtatctattattatcttaagtggagaccctcgataatatacaaaatcgaatatacagctgaagccattgataagtcatattcgaaagaagactctggtatagattaggaagtaagccgctttattagaattagctccgaaatgtctatatagacaactaagttgatttataattaactgggctccgtgttatatatataacctcatcttttcctctagaataaaatacaattaatatacctctgaactataatatattgtaagacaccactactagtctagaaagcggtctaaaatacggtggcttcattgactatctaatcaagagttataagaccgtcggatttattctcctggaattaagtcgcaagagtataaaggtataattggatacgaaaactactaatatcggtacaaaaagaagagaactctgtagaagaattcatacttaaaggtacgtttaacctcccgctcattagacttaatacctagaaaataaatcctagatacgctattacggcttctagagatacctagcaacctagctaaagaaaccattcttacgaattttgttggcctaagactggtcagaaaggtatggctcattagatttatcctctgttatgttctcgtcgcccgatgagttagtagtattctccttttgccgacgatctaattggcttcgttgcttcgcggatacgataaagcgctccttaaagaccgaccgcattgcaattctcgtgccctgtttgaaggtgcctagatacgagataatgaatagtatagtgttataaaccttagtaggatctttttttttatcgctaaattcaccatatattattagaaatagaagtcgaaatactgcgtcctgtactcgagatttatcgccccttacagcttgataacgcttatacctgagtttataatcggttttataggcccttaaatcggcaaaaatattatcaattaactgcctagcaagtatatcaaccccgaggaaatcatatatttcacagagagtgtaatattaagggatatcgccttataaagagcgaaaacattaccgatagcctgattctaagcccctgagagtaatattaaataaagtaatattactgtaaataaattcagtttttcgcagctaggaaagacgttaaaagctgacaaaggctgataaatatggtatcgtcgagatattaatattatagaaagtatccctaatttcgagtattattttgtgagaatttgatttaaccgctttagtcgaacccattttgtcgccgagtttcaaataaagatcattgggtaatatcctactcccttctctctttaaaactataaggctatcacttcgactattatattttacgatagcattcctactattctctcttaccactctaatgattcccttaaccaatacaactaatctctaaaggttattagtatagtttcgttcctattcagtaatcttataagtgatgtctttgacctccggtagtctaaatataccactattgtggtaggcacggataaggttaggtgtttgtgatacctatagctatagaagaacttcttagatgttaaacggcttatgggacacttgtgttttgatcttaagggttgaattaattaggatagattttccttttttctaaaccactaatttagacttggtaataagacgagagtaagtttcgggttgtgaaagagacagattttccatcatattcagaaaattcttattttccgaacctataccttaaggttaaagatttgcagcttctttaatataagcgtcagtcttgtagtgtactataaattttaaatcgcctaagttataggagataatccgatgatatctagtgctaccggatacttgggtatttataaacgctttctcaaacttgtgaccgtagtctctgaagtagtgtggcccgataaatgtatatatttcggtttctgcctagtaaaatattgctatattacttatagtcttaattttaatggtaaaaggctccagtccatttctagagagatttggattaatgaacgacagaagtttgcggatattatttcgattagttatcaagtcaacttaatatatgttatataaaggcttttcagtgtatagtaagcgaaaaagtggtttaagcggacttttaggatagcaaaacgcgttttgagtaatataaatgagcctaaagtctttagccacttttttagaggtttggggtagagaccatagaggcgggcagctagggatagcaatagtagggctggacgattcgatctaattataagaagataaatgctctatattcgtgatagatagctggatcttcttaatatctattaactctaggcgaggtatatctacgatctaaatagaacctattgttactttacttggttagtgatattatgatagctaaggtaaatgagatttagattaagtcccttgagatatttaatcagtataagtcctatatattaccctgtatgggtttagataatatatacttatataatctagccttaccttatatatactctttgtctagtttgtatagaacctttagatatccctgtaggactcttatttaccgaataggagattagaaaaggaagagataggtaaaaggaccctataggtaatactaataatgatactaaatgtaaagtgtgaagtgataatttagctacctataggattatctatatagaccgtactctagactatcatttgatactattaaagccataggttaggtagaatcctagtaattgtgcgcttactacaactagtagccttacctgtctaataggtactaagtttaccactctataatacctcagtgctaatagaaaccatatatgtcctagatataatctattagatgtaatagtattacgttagttcgcttctcttagaggcggtaacacagtgtaaaattataggaagatattgataggataacaactgctaggagtctaggattatcggggttgttaaagtctatctctagcctacttagggttaaggggcgcagatacttctgcgaatacctagaacccctttagaggtaacaaccagctcatactatataagacgagaaagggaaacgaagtcatgtaataaattgtcaagttactgcatgtaaggcggccctcccgcgtgatttatatactgtaggtttaacttaagttccgccgctactacaaataaagtactatagaccacttaaaaaaggtgcttattcttattaagcctctctatctagaggctctaactcttaactatcgaaattaccatcgggaaaattctaataggtaaaaaacctgattgtctagcaagtactatgaaatgttaaacaagtacctaggagatctattttattagaagagaatcaagctaggtaaccctaaactctaacgaccatacgaagtatataaaatagatgtgacctagtagtgtttagcctataaggaaggtgctcttggggtatagtatttggaattaaagttgggctgagcaggacgataaaccgaataccgctcttaagttcgggtcaattatgtgatttaaggtatataaaatgacctaaatgttacagatgatcggttattttaggagtaactatattatgagctttagtacctagcgggaaattgtagcctagcttatccttacctatcttagtcttagatacgtcctgtatcctttatcgtgactagcagtacgcctagtgtctagccatgcctatgtctgagataggctataatttgatttcatatatgtactaaagctcagatccctttccgattatgaatgataggctgtttcgtagcgctagcctactctatatttattctaatactactcggatcacctcagcgcttgtaatatgatactaggaaaatatatacgttaattagccgtagggatatatgggcctttacactcgggtttagcgactagaaggatatatggacagctataccgtggactatatacctttgagtatagattttggtataataatatatattttagcatatgatatctttgaatacattcaattctataaatctactatatattatatctttcgagggccaaaatcgttagtgaaatcaataggtatgaagtagagagatgtaatatcggatgatactgattaaaaagtacttttagccgtctccttcgatagcccttatcgtaataacagcaagttctggtcaagccggctcctataggaatgcaaagtgtaaccactggaatgatatacacaataggtatatatataaagcagcgggttatcggaaataatggaaaatttgctaaacgggcgaccacagaatctctgggaaataggctatttgctcgaaatgcgaggcttaccccgctggtaggcctaacggctttgaagagtggattaatctgacgatctaaatactttagtttatacggctaagctattaactgataaacgattgataaccatcctcttgaccgctatctaaattgatattatcaccgttgtcgtcggagcttttaatatcgatctaggaataccgatataaaggtttttcatttactggataccctgtagacctaagctaactaaaaattccgcgagttgcagcctctgaagctacctgggaaaataagtttgagttattttgtatcgggtagtagttttccttatatttctttgttaggaattccctacgaaactctattagagatatgccggagtctttgagcgtttctccatttgctagattccagttctaggttttgtactttaaacagtgatagcggtaagcggtatattgctgtactgtaatttcagtattaagaagtcgagtttctctaaacagtttctatggatgaatggggggtctagtatatccattataagctgtaataaatagtaaacgatactcgtcttccctgtagattatttaaccgttattagtaccaggttctacggttataaaagattggtacattcttgtctaagccgctacattgaagtccgtggctgtaagcccgatccggatatttcgtattatagggtttactagtcctaccacaattgcaccgagctaaaggctagctaatctgggctgccgatatataaggaccttggcgagtataagaggcttcttgccctagactaaagggtttgttattacaaagataggattaagccaggcgctaataaggttgcatttaatctctctgttaaagaaggtactagaaagtaaagatcgcataccccacgcattataactcagtatcatataatgggaaagatattcagagtattcctttactagatttgaggatttttgtgatagagacgatagtctatagtataaggctgatttcgggataggaagcgaaatggaatctccgctaagtaataggatataaagcgtagtaactagggccacggaacactgcctatagagtcggtaacaggagcaaaacctggctagatattctaaagtagtactagataacggtagtcctaccttagagattagacaacctcctactatccctatattaactttattggagagaataatagactaaggtgagtagtatattttttttttataatctattattatttcctagccgccgccagagtgtaatatagccccctactaagctgcttcagcagctttaatatcgtgtctaatatcaatttcgattatatcgcggtatctggtacctattataagctgaccggccttatacgtgaatttactactgtattagtatcctaaagtgtattctagtgattctgcctatcgtgtagaaaggatataagcccacgtaaggaataaaacgctaatataatttccctcgttatggttcgagataccattaacaccaggccattcttataggggggtagattttaatatctctactatcaatagattgggaatagccagcagaatatctaaagccattgttttcggttcaaggcaatattgcccatataaagtagtctagattgattgtctagtgattagaagactaaactgtcccctgctcgattccctttcaatataagtaaagggtagttcagtgtctttgggcaccagaccatatctaaggaaagacggtattcttttgagaagcgattttagatcgatggaagaaggtgggagataaggggttttatgagtatttgttaggtaggacgaccatttatcatagctttcggaaaggatacgatcgaaattttctttacttggacgaacggcattatctatatcagacttagactatatagttgagtctaaggcactgccgctataaatctagcggagtgctagactgactagttcgaataaaaaaaaaaatatctaggggcttctcttataaacgccagataattaataggtaaaatgacgtataaagctaatgatttagatgtatctaaggaataaaaatagtaatattagtaagttctgggggaagggaagttgggattgtacttaaattaacgagatggtagttggtcgaacaccctggtaatatatgtctattattactaagcattctttgtttttccgttccgaaatatcctttatatatacaatcgggaaaaaagttatgtatacgctgtaataagctaatcctactgtcgtaagaggctgctaaaaaggttatatataataacaaaacctagggtttaataactgcgtttccttatcccaattatagctagctctatagggggctaattaggtctacgttgtataataagggtattagatagaaatcaaggtatagtgagtatattggtaaaattcacaatggtaagattctctaactaaggcccgaatttgataaactagtccgatataattaataagtaaaacgcttagttaaaaaagttatatatttcagcggtaaaaagaccgggtaatcaatgttacgccttatttcttaatactaggatatagtcctaggagctagattagagttcctaagggatacctacctcctagaattgctattaaggtttctagggtcaatgtattaattactagagttaaattaataagtaagagaattcgtcgagattctgctagcccccgagttgtattttctgctaataaggtccgtctagtcgattgtactaatctagtgtaccgcctctatatatattcctaaggcaaaaaggctactatctacactgcaggtatgtgaatcttagtctgacctattctggagttccactgatcctgaagtcgatacaattttaatagaattgaggacattcaaccataacgtataagcgtaaggactatagctctttaccatctcttcgtctgtagctttggctacccgactatctaagtcatatattatattaccggtctataagctaaatatatgacagtggaaccattaatattgtaccagagtggccctgaggatacagtacctatattagtattctgtataaagctatagccgatatactagaccttatcctatcgctttataccatatagcacaccctaggtaaagtatataacttaaatgaaagggctaataatagggtgcgaatatccgattgcgaaattcgctatatagaagcttgaaacgtctattcttcccgttaaggtaagtgatttatcgtgccttctgctatactatatccagttattcgtgcaatattttgcgctctataacatgaataccattgctgatatttatactattgtagataggagcagcctatcgctatctgtgaaatatacttataaggagtccttttatcctaggtccgagataagacctaggttactataacgcgtgctctatcgtgtcttcccctttcgaccacactgcctttataccatgatagtggggtgggatattcgccatctgtatcgtgaggtcttatcctattacaattgtacaatttcttattataggtaggttcgtcgcgcgcctttagggcttagaagttacccggtatatctggcgcggcttcttcgaagtaatagccggagagtacaacgaactagatataacattatattaatatggtataaatggtgactgtattactgaagacgattgtaagtgatctttatcggtaagatatgactataaagctaattaattgactcgttctaagtaaaaattctgtgatctttataaactagtaagttataaccactcgtcctagtagtttaagccttactaaatcggattgtataatagggggtactgtcatgttcctattactcaagtcgaagcgcgcaagtgtattgtctgctcgggctccctaataccgatgcgatcctatactctatcaccccgaaatgaccattggtagtatcgataataagctaatataaagttctgatcgcctttaccttcgcccttctctctcaatcgactctgtaccttacttaggttatatactgatgcgtctacgctatatataccctaaattccaatggcttataccactgtatatcttattcgaatattgtgaacgaatagcccttatgaattagactagtggtgtctaatgggtggccctacgttattctcggatggtatctggcgtattttaaagccgaatatttcctacaggcgctaggaaataccgatgtttcgtcttatttaatggcaagggagccctaccttcgccgttagctatattgttagtccaaatccgtgtgcaaggggaaggtaaggcaaaactcccttcgtttctgacctataggctaatttcggtactagctataaaccgagaagataaggccgtttataccgaggtacagccgagctaactaaagagccaaaaataccgtccgatactgtcctatctgatcctactccgcattacttaggtgttcgagatatacgaacgagcggaaacggaccaatgggaaatatacgaagctattaagtcggtattagaaatgtctcctttagaacagatatttagtagatttggatcctaagtacccattcctctataaaaccccaatagatatctatagagtcgtatacgccttagatatcactgaaactgtaggtcattaagctggccgtatatctctatctattgatattgttttctaacctattgcgcgtaagcagctcctaccatagactcgtcggattctgtataccatacgtcggctatcctttcagtattaagtatatatttgttaaacttaccacgccctggacgacatttggtatattactgttcaagtatatcctttataaaggtgagtttcagtctgtaataataccacctagagctatcctactgcgttctatcggcagcagagtaagcttaattgtataaacccgggtactatgccccggaaagtaacgaccggcggttcggacgtagtattggatattgatatatagggtacgatatgaattatagttactaacggggggattacttacaatgttgcggtaactcccgaatataggagccgatcggatattcttggttggttttctttattgtgaatccactttcacccttgggatggttctaggatatagctatcctatagtagagtaagcttaagtgacttacaatcgccgactaaagcgatgacttcgaataagaaggcagagtctattatatcacgatgtttaattaagctaataaatggtatttcgagcggttccttataaatacttctatacctagtaggtctaatcttaagcgtatgtattgcctatatatagttgaactaacggagggcagtctagggtttacattcgaccagctcaattgaagtaggggctgtatataaattcaccgagtgattagaatggtactagagatagcttatgagatagaatcaataaattgatatatctattatatggatgagatggtaagaaaacctccgtgttatatctagggatattgatcgacctcgactcagcctacgaggcctatggattcgtaataacttacttctacctgtctataggtgggcatggcgttggttggcctatggccgcttattaataagcccttaatatatgtatttactttacaatgttttagctacgtataggtcccacaatgctatgtatttagattagttagatagaagtatatataacagaagagatggattgaactaagcttattaaagcggtggactgttgagtctgtgatgctagtggcgtacggttggataagagggctactagtaagatctgacctgaatgaccctcaagggtctgtatttttgagctccaggtttgctgaaacggtggaaactaatatatctaataagaattcttattttaaaattgtctgcgtattaccccccttctttagtgtaaagttaaaccctaagcagtgagtaaagttgaagggacgtattatcggcttttaggtctaagcgccttctgtcaatcagagtctaagtaaatacagaatagcagtcgcatttcttctattttagtcatattcgagggatattgaccctattgcgattggcagtatacggaattgatagcgttgtaaaatgtgcgatgtcattttcattagacccgaactgtggagccacgctttacttactttaagattaaaatattttatattagaagggataagatatttagctcaaccttttctattaaaacgagtgaaatatatacgctccaccggcctctaacacatatatcgcttatcggctagtatttaattagactgattgtagattaagtttcaaattccttttatccctactcagggtacctaagcggggacttgacagaagattgaactttagtctttcctttcttattcttcttcttgctacttatgcttaaaatagaggttgtggatagcggtatcggctccacagtatactgctcgatggtatactcgggttgtggagtcagttctgataacgtagggctgtacgataggactacactttctgaatcatagctactactaacagcttccacaagtagttcgattgagctgtaagagccctcggacagtgcttcctggtcctattaagccctagacccaggcctatcgtttgtatctaatggtccgattagtgtatgtgtaacctaatgtgagtttatttcccttaccaagtcctcttatactaataaaacgccggtatatattagagccctttgtcagaatccacaattttctatttaactgctcccttaggctttggctttcttccgattcacctacaatcttagagaccaagtcttcaggtatcttaaacgtagtaataggtataaagagtgctggcagagcggtaaggagttttatttcgatcacttcagtggcgacgttattaataaaacgtttcagtgtaacctatactcagtagtatcgagattaatgggatatttagaacagtatagaggtcacgcgtcttaccttatagtatacaagcatgcagtccagtgcctcctctaaagtaaatcgagtcatatctagtgtgcttttctaaacaagggagttgtaaaggccccagagattgatagtatatcccacagggtgggaggtcgaaagtgtattagccccaaagtatgattgtagagccttacggaacgcttcgttttggcgatcagctcgagtgtcttgcagggttttagtaaagtagtgattgtaagtaattggatagcctcgttaatgcgatataaggaactctctactccctttttctagggtatactgtaagcttcctagagctggtaaaactatcttattaaaaatggttttcgaggtagccccgtctgccatatagcagactgtatgttaaagaaaatcccttatagctgcccaagccctgtcaatatagctttgcgtgatatctccctatagggcgcactattcttaaaacaaatctttaacgattataggattatatattctaggcaactctcgacctcttgtcttcttaagaagtatttcaatatactaaacatattcgtcttgtgtgattgacatttgatatttagataccaatcgtctatcttcgtctataataatatatcgtgaatagccgcgtagggagatcttcttcgtgaattgcttatttaagttctgaatgactgctcggatttacttttggtagccagtgtctgtttttacatctctaaagaaaggctcgctgtatatgccttctacggctactttgataagagactggaaagcttgacctatatgtaaaagatacgacctttacttaaacactgttgcctaagggtcgccgagtttctgcagctgtaattggcaagacttgacttttatattgatctcgttaataaggctagggagttcgcttacgatctagccaagaagtagaccgctcagacgcgttctcagagagtctacgcctacaagtgatagcggaagctctttctaaattccttaggagaaaaactcgtattcccgaacgttttagtcaaacagacttgacttacctttctccgagtctatattcttcaaaatataccatcctagacagaactccacctcttgattcttagtaagcgatataaacgaagctttactctcagatcctagcactaatatattaggcttagagataacgcctagagtcctgattctagatagatcagtatcccgtgctaaatgtagaacgatctggtttataaagttattctttacagagataatagcaaggatgacacttcggggctctcgtatatacgattggactatatcttaaaccaactgaatatcggctgccgactgctgctgtgtttctaagtagatcagtcccggaagattaataattgtaagatgtggccgatctaggccagagaccttaactcgcagaaggttatttgaaaacgcttttctgtaggttgagattcctattgctgcctttgcgttctctatcaactctgtaagaccattgaaatcattgagtgattcacaaaagctgctaagcgaatgctgctctgtatcgctgcgggattgataggggataatagaaacccggactcctacttacgaattcttctgtagaactaattcggttagaaatctagtgcagagactacttttcactagaaaagagataccggagatagctttaagaacggagctttttccagaagattggtcaccgcagacgatgatctgtggaagggagacatagtggctgataccttaggatcggagggtatcgatggaatctaaaagatccagctgctcttaagtgtataagccttcaagcgcctctgtcttaaattgcgttaaggttatggtgatactgagaattggagacacggatggagtggttaatattgttagaataagtagcttaggttttaataaatattggggcagcctactagatgtgtatatttatattccgctagactgcccgttcctttctaaatatattacctcctcgataccagagtatatagtagggggtattctttctataggctgtcttgattgcgttagacctagagtgtagtctccttactgtagaactagggaggaatgtttgctatttaaaaattcaaggtcgttttgtttgatatgaaactgcattcgcttatagttactgactggctattagagatcttccgatataagctttgcctttttcggtcttttaaatagagttccgttttaatttaattgggaaatagatcggcggatcgaccaccccctatgcaccgaaaaaaaagtacgcatattatagattcgtttgctaattctaattacactctgcctattgtaagggattctagggctagtaagagcgttttctaagattaaggtatttatctttctaaaagtgggtattatatctgctttaaggttataatgaccaagtaggttgatatcgaggcaggtctttcatttataggcttttaacgttactttagaatagttaattgggagatatttctatctccccttatacgaatacttcatcttcgatagttagaactagagtcaactactgtattctaattattactataaatctacactctccttctactgtctacgagctttagtgaatcttatatctgaatagcaaaaatattcctaatttttttgactctttatacgcgataaatgcttccggctaagaaataaaagcctatagctatatggtctatatacaaaaatctttataataaggtgttaagtttgctggttaaaccagatctttactatgagttctatgagaatgataataatatgagtttaactaatatacgtgatataaatgttatgggccgctttatatatcataatcgagcttgtagagctcgtggatggtctagtaatatgatcgctattactattcatctatttccggggcagaaatataatacaagggtataccactaacgctgtaaattttgctactagctgagccgaccggtattagaccagtcatatactgagaggattgtctactagattaggcaatggaacggaatccatatggagaggcctctaatatcctatgatagcaaaggtccctataactggcagctttgtgagggatataaagctggatactgctcttaagcagatgaggattaggtagtataactagatcggtttattagttgcaagttataagagaagagctatatattaacacttttttagattgatactatagcgacttggagttggagtatggtcgaccgacgaatatatgaattaaaaaattcctttatattatggttatatcaacgcggagtcatattagaggtttaaatggaagggtaaatcgtattgtatctgttacttgtaaaactcgtttatagacggcggacttttatcgtaaaatgaattcaaaatgttattaaaatattcttattccttaatcgactattaatagacctagtatatttaatatcgatccagctcagctgaaattaacaatcttttacccatttggacccagaaacagtttgggaaactagggataacaatctttttccttaatatacatatggtataactcatactccttggtttatgaaaaccttaaattgcagttcagcttctctttattatactatcactctatgtttatatatggaatccttagagctaagtaacagttctagattgggagatcctttagggattgtcactatatcttcaatttcgacttcttacaaccgtagtctatgagctcgagtttgatggccatatattagctcttctaccactggatttgcctttatataaagatcgcgcaatggcttaccctgagaggcctctaggagttcgactaacaatttaaagtccgcctcctttaagtcgtagatcctttaaaatgtcagttacctataggtataatcccgcagggtatatatatattatctgaaactcctttgtccagctctcctattaataagcatggctgtaagaggtatattatactctgcctaaaattgtttactagggtttggtatcgttatccgatgattcgtaatcgcgttattgccctacgtcttcgtttgtacttaggattatctgtcgataattgtggaaagacctcccttatcattctctccgtaattatagtattgttattgtgatttaggttgccctttttttgagccttaggcgggaaggattcgactgtataaaaaaccgagtttatagaggtacggctttgaagccctctatagtctcgaaaaagttctattaggtggtagcgtttgagaagaacattgagggcaaactttctatcgagacgatttataatttcgtatcggtccttcttggatgtctgtcgcgatactatttctcctgaggataagttggagcttagtagggcattttttagatagataaaagcactagcattagtaatataaatgagaatggttcctaatgggtccgaagagcggagtgtggttagaagcctttgcttgatatatctttggaaatatgtttcatacggtaaagggtgcccttttgcttcgcatttctggctttccctctctagaaagccactatacttgatttttggacttatcgctgtatacttctctggtctattactcagttgggtactgctgtgctgttttctagagacttggctgatatatagctctttcaaaacttaaacaatcgctttactttggttgctaggctctaggcctgcctaacagtgttccttaatacgtgaaggtagatcttataacgagaggtaagcggtcataggaactatcggtaaggaataattataagagctataaaggggatattctaaatctagagggataggtacattcgtcgcttataggacctcgccctctggagaacagggtcgagaatgattcacagaatgtatatctaaatcatttaaagcctaggtttccgggttatcgctaaaggttagcgatagaggtatagtgatgtccggtatagagcttagaactatctgctctgtaccgacttaaacgctattaatggccctgttattaggagatggaatagatggaagtggagttttatgtagtggatttgattagattagtgagatgtcgctagtacttggaagatatctaggcctttagaagtcttcttctataggttgagcggtagtaatctcgtaagcttctaaaagcatttttcccttgccttcccgaagaaacctgtcctagaattaatgatactttagataaagggcctaagctaacttacctaagccgcagtatactatctaacactagatctaaactactggtccctatcccaattactgctataagggcgctaacggccgaagcgagactattcttagccctatgtctactcgtgctgtatttaattaacttattaatgccgttcccttgcgcaatataggctcgactcttaacagtattatagtcggcccgtaccgctgatatcaatcctgtattatattagaaggctttcttcttctctgattctttaatataccccttgttttggtagacttagacgccttatgaccaattttcgcaatcgaagtattaattaaagatattccgatttgtgtaagtgttttgaagctatctaggatatttggattaatactagcggctgttaaagcttagtgtataagcttattaggcagtgcctaaatgccgaaaagagctcagacttacttagccttagtaacgtttattgtggtatttattgtgctaatttacttgtgaagagtataggaagaataactaccttcctccgctataattagtgtgatttatactcgccaatatatatataccgacttttcgaaacttgtatagttgaggaagagaatcaaggtatatatatattcaatataagtagctaataggaatatagctctataatagtagcctgtatagagtaagctttcatcttcctgctaagccattagcttagtaggtcaaatacgtggtataatatataagaatagtattattatagaaatcatgtgtaagaaaaactgtaacagagaatttgctaatgttttaactctatcctctatattgctataagcgatatatattgggttcctactaaaaaaactaggctgttattagttagatattaaattgcctgtggtgactgctagctgaagttaataacttaaaagaggcggtgaaacggtttgtcctatttgatatgccataaggggtctagagtactaagggctttatactgtactatatccaggactatcgaccgacggttatcgatagtggctaaagtagggaatgattagcgtagggatgctagttgcggtttttgtaagaccatctcattagcgattatacgggaagtcttgactctttcctgtagctaatctacctttttagctcatttatatggctaaaaacgattgatggactgcttatacttaataccagaccgcttatattacagcgtggtatatgaagtctttaagtatgattcgttagtccgtctatttgtactaagaaagcagagtttaggatttgtttctaatccaccttatatatatttacttattatttgatcgcagttaggcgaatatatagcccgataatcagtcaagtatatttttagctttaaaactccttggcctatcccgcctggtgattgcttatctagagactttatctaacggatgattgaaaaaataaaaaaaaataaaaaatgattaatcgttttagtttttaattatcccttgactcgaaatatatttatcgcaataagataagcttttttagttctatttcactctaataaactaagagaagatactaaatagcttttcagaccatttaggttcttagagaatactatcggtgtctacatcctctatagggaacggtacggcttggcgtttatctttaaagactaggtaatgaatgattggaatcacgatatcacttattctgtgaagattctgcccctaggaagctttaagtatattgataaattctcggaagatctcaatgcttagggcaagtatcctgtatttattaacacttatctttcttagtaatcattaaagcagggagacgtatatatttatagaaatttttggcctaggactatcatagctgctgtaataagataacagtctaataatcctatagccgaactgatcgattaagagctatagcctctgtccaagtcttcgtaaatctaatacttttcgtcgtttatatgcgttttgttctaaatcccgtgggcatgggaaaattctttctattatcgagtctgtgatttcggcttctttgtttttcactaggtttcctttcttttttggttgagacctaagttagtccctgttaataataataatgttggtatagggggattgcatactgctactatagctacggtatagacagaccgtgtggtatagttctaatatattagagtggcgaatagttccttataaatctttaatgacttggagcctaatgctgccagataaatcatatatataccgttccgattgcgacttctctataatgacctgtaaggagcgaagagcttcctaaagtgatacaattgagctggcactagctacctgtaccaaaatggtaaatagtctattaattgaaggcttcgaagaattgaccaaagcttagagtctcagtttaatctctttctgaaagaaagtgtcttatagaggaagtaatctactttgtctgcatttcttcgttttatatagaattgatagcttctagctattttctcctgtttaggcgtttgtaatctttactttagggctggtaacggtgacttgaggtttcgtaggtagttgagcggaaataccaggcgacgaggaatctttaagtgtggtaaagctacagcctatagaaagttcataggcaaaggcaggaaagcctatagagagtgtctcaagctatgctactttaggaaaccttcctagatccactaactgattatattccacgatagttatagacggcaatgatatacccctgggatttccaaatgataagtacgatacctagaaggatatgccactattgtatataggctctatcactctttcaattcctttaaatgtataatagaatgaagatatatcgtagatctcattgccctcggccgctatatcaaactcccttatttctatatcgagtggaatagacaagtaagacctagtacaaagttgttctttaaaaccggccatcaaatccaagctatctcgatttatatcgacaattctattagggttttggctagttagttaaatcattggttctatacagatatatgtaccctaaaagtataatagcccttaccacgtcttctaagttttgtattacttgccatacagctctaaccagagagttaagggctaataagagctgtaaaatagtaaattctccacttagaaagacttattctaataaagctccgatactggattgccttactataaatgcctaataggtcacgtccttagcttaagctgttaagcttgccacaatatctttaagttatcagactaggtgtcttccttctttaaggagcttaccttaagatatattcttcttcgcaccaatactagtaatcaaaaaactaataacagtctcgcctacgtgtataagcgcacggtttatacctgggggtagctcgctagtactagccacagtgaatatttccgtaatcacagtgttcgatagtacctggtagccgataagcattcgaacggaggtagtgataattgaaaacattaatactcaagtgtgtagacgatattactaaatccagagaataagagctacctgtaggctaagtaggcgggattagcctacatttatgtatctttagctccacaggtatagtcactgattacctaattagatatacgtagcacgttgctaaatattgtggagtaacacattattcttggatctaatataagtatagactgaccattccgaccagaccttataatctcactagagctaatatgaataccgaaggtcctcaatgatattatttcatgattccatcagatgtgggtcttacaatgaatgaatctatctacttctaggttgggttgattgtactttcacgatatcaaatattggaagatttttgtttcaatatattatagcctttaatacgacgataaatagacgctttgatttatctaaatagcattttcgattatctgtaaattctcttctacctagaatattgatatttgttaagagaaatggtgaaagaccatgcttacagctcgtcgtagatatagatttagccgtttactttcttttatttcttattgagctttgtcgaaactagtttaggggacttaaaagacatatacccctagagcatattttctatgatctgatgactcgttggacttggttagcctaataaaccgctgattatactctaagaccagaagctataatcatcaatagtcttcaaacgatctttaaggattgaatgaggattaaacaataaggttgtggttagatctattgctttttgctgtatatatctagcacaaattatcctcgcctttatttaaagtgacgttgcgcttacctagctccctgactctaaagcagcgatatatataagcctttattgagaacctaaaactctttttaatcttttggaaatgcgtatacttccctaatacttgctaacaatctacggaaccaacttatttagtagatcgaaggctgccacagggtagaaatagtaggtaacgtttgctacagtttcaacttcgaattttattactatatcgtccactagccgtttccaagcaacctagcaagcaaattctttatataagcgtctatttagggcatgaagtgctctactacttacctaccaatatactaaaatgtaatctagcgattccttaaatgtaaactatgctatatataggatattaaattagaggggtgattttttaagtcctcgaagatcaattgaataatggcagacctgctattcccttattagaaaaatcgtatagaagtaacgcggaaacgccaagcgtaattattcattttctagtcgatccctatttcttgtagagcctcgatatatttgtgattgcatttgatagaatcttatgtttagtatgttattagtcgctctgctatcccttttccgaaggtttcctgtgaattttttaaggctataataacctttttgtatagagtcgccgatatagcctgataagctatataaagtatgaataatgtgatgaaaaagattatttgcggcaggttagatagagaaaatatagccgagatatatattactttgtggttctttttttgaattcctaaaagaggtctcttgttctgcgaggaatataagctcccgttagtttgcaggtatatataaagataacaaattttttatctctatgatagattcttctctgtactgttctttcctgctgtatcgaatgagcgacagtggctacgtcttgaatttctttagcgaaatctatatccgtatccgagtactgcatgaccgcgcgaatgtattttgtatccctatatgaatttggaaattccccaatccttagataattttgactgtagattgaagtaattagcttttgaaaggatatagtcttagcgttcctaatgttactggccctttctgaatagctggtttaggtttgatatatatcgttttatcctttgttaccttaacgaagctagagtagttctactgtagatatctaacaaataatacgccagtcgagcgcgcttagtgtttatactaataagagattgaggtatgtctccttagtgtcttggggaaataactttaattatcggaaagttcgcttaggtagtttctagtgacttctatcgagatccacattcttcaaaatatggtatatacctccctggcattcttatctgcgcgaattatatatatgataaatcatatttggacggtcgcaagtattatataaccttagtaccgaatttcttctgtggccgttagtataacctataatatggatgtaaatacctagaacttaccatagttgcctaggtagttatatggtgttgtaacctttattatttttgtggatatacagactgtcacgtggttaatagctgcctgaaaggtcggtcgaccttgtacactgggcggtaatgatctattatttattcagttcgcagtaactaagccactaagaacagactgtatactacttcttactgtgcttcgagttatatgcttctagtgtgtcttaaatactatattgagatgttcctcaatctattaccagctgatacaaaactctctatcctttttcgcgctgagtgcagcagcaatataagctttagagaaggctacttatatatacggaaaagagacaaaagcctgctatcgcggaaagactttgataattatttctcttagaaccaaaaacccacgcggttcctatccttcggtacttggaggtaggccatatagtaacgtaaaatactagaggatgaaggaagagttgatattgttatgattgctgtgtgggtagagggtttggtaggcgtatatagtgcggaggaagctgcttctaggcttgaatatattgatatagggctgggtctaagaaagtcgccccactataaggaataccttattgaaggtggcattgctactgatgaatatcgtatccttgcggtcttcgaggggggaggccttgaatatgatgctgtcttcgaatatccttcatatcggatataagcaacaattcctagtctatgtttccttaggcggagattaagctacgcactggaggatatagaatatgagatctacagtcattcgggagttcgcgataatatgaaacgagatgtgcttgtggaagtaatcataggaaatcagctgtttttcccgactttgcggtacaagtacctagggtaaagtgaaaacctcgcttaccaccgaaccaagtctatcactaatcaaggatatcggaagacctaaaatcgttatatctcgaataaatttagtatatgattgagattggatcacttaattgctctgaaattacttttattgctaactgttgctattaaactatagggggcgggggggtggtattttactactaaggacagggttatttgtcattctctctttgtccctatatagtaaacggggtacgctcaatataccagcgttatatcacgctgagaacgactcctgagatccgataacgctttaacagcacgatctagatagaaaaacaattaatgtatctcaatgggacacctaatactagtatatactagtatctgtagcgaaaagaaagtataattttggtcatttataatgtactgagactgttcttgctgcttatcatttacgaccatagtatactactaggaactcgagtttcgcgctattttgcagcgatttaggggttgattattgcctagcttaggacgcttgagctgagagacttaacttgggataacaacgaggcgggatcagtaataatatataatatgtctagaggtattactaaccttgtccgtttgtattttactattcaaaatcgaaatgtgattatagtattagaattacaacagtggtgaggaagttctaaagttaaaggtaagcattcgagtataattgtgtgtctgagagtaggcctagcgatatagttttatcctatcattctagaccaggggaatggtctatatggctgtaaaatactgcggatagtgtataaggacttatgatactatatacgttcctatagggagataggataggatagtaaggggactctgggactgaaagtatctggaaccttgttagctcaagagaatatgtatgattgggtttagttgaatcggtagtcgaaaacagagtgatctatagagtgaatctgatttgcttttaacctacgcctaagttacaaggaaatcaaagttcggcacagaccatggaaccacgagcgggactgccaattagtagcgggactgtaaatcatttcgagagctcgtttggatgaaccatggaaatgccgctcggtgagagaatgtggttataataaagaatttaagtctaggagttttcctacctactttctgggctgcttgtgattaagcctttgcagcctaaaaatgggaactagaaaagaattactataatctccatcggccggtatataggataaattcactgcggtaagactaatattttattagaaagttcctttaaattcattatcttgatcaagaggcgcagattaattgaaataaagtttagggctgtaggagggccggtctacaataaaatcttatctgggggctaaccggttttagtaaaacggaggtattttatttaagcttatatggtttgtctataattggtatagttctttacaatacgtctgctagagttattgaaatagcggtagatttggagatatagagaggaagtgttgttatagcctaaagagagcaataatcatcggcttattgcaggagaagatacatagcatctagaacgtcctatagactagataggcaaatttcagcttaccacttgataggggaacttaccttcttatgactgcgactaagaatataaccatagatcgggttgtagcttaccattgtgtcgctaaagtctgcgtgttattccaaatactcacctgccccagcagtacctcctaggcaataatcccccgttctatctaatcctgacagcggctaactttaggcttgtagatcgtatctggacctttgcaattatttccattttctctctataaatagaacctccctgatctactgttccgtgggtcgccgctgagatctgcatcgcagaaccctacctgcgtctatctaagttcacgcgtggtgtttgattggcccgtcgggtgctattcgtctccagggtctcatcagtgtgatagtaacgttgcaatcttgggagggggtggcgatcataagggcctagctcgtgggccttggttgcatcagttcacatggttgtcccggaaactagacctagtttcttgtctgagcttttcaaaggtctgggccctttttagctatcatgccaaagaaagacaatcttcatcctgagattcaagtatgccaaggcctacgcgcccagggagtagatatttagtaaagacaacataagtcagctgcgagtagaaataaaagtcagcggcgcgagcctagagataaagggttgactctagtgagaccaaaatgtcatccggccaaccccaggtacagctcagcgtttccgtcgaccacaaagtatgcagcccattatttcggcatctgtcgaagcacttcaaccctcattaagaaatggtaaccgtggttaaaatggggacatgtagaatgtaagcgcgttgagcgatttaattgcaaattcgatgatatgtacgaaccatacttttgcggcgttgctttctttttaacagttgatgaaagtggttcaccacactcgacgcgcaattttgggaggaagtaggccaggtcgagacttggctctgtaggccacaaagtctccaaacacccctttaacgtcgttgaaatcgcttcaacgcttattaacgagaccgtgactctcgctaccaactgcgcaactggttccttggtagagacgtagccgaaaaaaatataaaaggagccggattcccagcctaaaaaaaatcaggacttcggtcctcacactccgatgtgtcatggtgtccctctcttgtctgcgggcttgagagtctccgtgacgacggctgtcgctgccacgagcccagtgatgtaagacttgcgctccctcgctgccacgagccaggcgagtgtaaaaaggtgcttcgcaggataggtctgcgtgaacaacaatcctcgcagggggggcgctgcgttaccaagtgaactccgcagggggacgctgtgatgacaagtgagacccgcaggagaccgctgcgttaacaagttctctgcaggagaccgctgcattaccaagttctctgcaggagaccgctgcattaccaagttctctgcagcctaggccctgcgtcaacaaagcgcctcgcagggacatctgcgacaacaagcgcctctagcccgtgcaggcacctcttcgtggtgctagggaccagtattcgagtgttccaagagtattcggagaagcaaagacctgcgcaacatcttcatcgtctgttcattgttccgaacggtcatcattggatacatagaaggggccctagttagatctttgctaatttaatagccaaaaacataaactaacaactgaagcttcttcagtaccaaatgacgtatttcacattcctttcccttggtagcttgtgatgcaatagcttcctcactataatagaaattggcatctttcatccagatgtatgcaaacagagatgagtgttgtcttggaatgcttgtggtgttgaaccgttggtgttcaaccgttggtgttaaaccgttggtgttgatgtgagtgttgatgtgagtgttgatgtgagtgttgatgtgagtgttgatgtgagtgttgatgtgagtgttgagttgagcgttgatgtgtgtggtgatgtgagtgttgatgtgagttgagtgttgatgtgtgtggtgatgagcgtggtggtgaatggtcgggcggtgaaggaggtggtcaccgtctagaccttgccatcggtccatgccaccctcagattatgtaagtttcctgaatagggggttcaacttttggaaatctatcacttatcacctacccccaataaccactagtatagcagataattgatcataataaaggtgaaccctagtatgtagtataactaatatatcgtgtttataataaattactaatgggctggtaggcattatattgtaagtggttttgtagcttcagcatgttttgtagtcatatatatatttacgcgcatcacaatttctatgtatttcggatcacactttcaatttcacttagactcgatagtccattgcttttactaggtttggttatagctgaacacatccattgtatacctttctactcaaataacctgaatacgtagcactataggacatatacgtgcgtggctaaacattataaaattataaaatttcatatgactgaagtgcttattagtaaacgacacatgggcccattaaatgacacggggctacggtcaaccgcctgcccataggcaggggtgaaaaaactcagtgcgaatccatgggcctcatggcccgtggcgaggtctatcaatgtctcaccgacatagtacggagattttcatgccatctcacccacatagataaatgtgtcaactatagattctatctcgtaagcgaaaattctagtcccattctgatcactcggtaaagttggcatatagcgtcaatccgatagggatagtagatccactggttcaactatgaccaagcaatatgccaaggcccacgtgtagaagcatgtgataaggtgaacgattggcttgaggaaaaccagctatgcggtaggctttgtgccttcctaagtcgaagtcatcacttcaggtggcgattgtgagtcactcgaccttaccctatttcagctcttatatcccagagagcgcaagaatcaaagtgatattaccagacaaccatgttactgagagatttggacaagcaagcaatcaagaatacccggttggctcctactatgcctcggcaacgacagatcatatttcaaccaatcccggatcgaagtgacagcaattgccttttgggaagtggtgtcctaagttaatgcaatcaaccatattctgctgataagagaacacggctgaaacccgattgaacccgattgggttctagcagtgccgtctgaacaaatttccattgggtgatatccccgcaggagtgctagttcgctcgtagtcgtagtagacaatccggccatccttacaaaatcaaccatcatatgagtgttgatcgacggtagaaaatttgctcgaggatctaggggatagtccaagaggtcctataaacagtctgattcgatattattgcggataccaaagtctttacagtggctgcctggccgaatagtaacatgcccacgtgtcctccgcagcgcggcgggctcgacgaatatatgatttaaaaaaccgtcgaaatagggatatagggaatccggatttcctgataagtgcgtgatatattaggagacgatataaacggataaaggatatgcgcagtcgacttgactaacctgtagctgcagtgacacctagggtaaatggtcttaaacagtctgattcgatattatttcggataccaaagtctttacagtggctgcctggccgaatagtaacatgcccacgtgtcctccgcagcgcggcgggctcgacgaatatatgatttaaaaaaccgtcgaaatagggatatagggaatccggatttcctgataagtgcgtgatatgttaggagacgatatgaacggataaaggatacacgcggtcgacttgactaacctatagctaaagtgacacctagggtaaatagtctttgcaaatagtgcttcagcttgataggaaatgcgtatataagaaccaaccgggtataccacaacacttttgacagcccttatgatatagcttcctatatgcccgaggtgattcttaggtagtgagctcttattggcttacctgtgccccgatcctatcctctcggtttgtacctaagataaccaatgttaaattgtaggctaaaaatgagaagactttgcgtctccttccccttgcaggtagacttgtgctaacagcctgattatctgcggaggtacactcatctgctaggaagcaagacaaaacattagcattcctatatcttttggatttctaggcctaggaagccaccaaatgtcatccgaagataacgaggatcacgcattcgataccagcagcctacgccacttgaagatattcgaaaggttgtatacttagccacaggtatgattcgggtagtagtataggctgatcggggttcaggagttgtatcatatagataaatcgaacaatgacctgatatacagaatcaatagggagaaagaggccgaggtacgcgatacgaaccttctggtaacttatcgtcgatagtagacatgtggaagggacagagagcatgcgacagtatttgtataggggagctaagataaccaatgtcaaattgtaggctaagaatgagaagactttgcgtctccttccccttgcaggtggacttgtgctaacagcctgattgtctgcagaggtacgctcatctgccaggaagcaagacaaaacatcagcattcctgcgcctttttccacttctggaaagacatcaaatgtcatccgcagacaacgaggatcacgcattcgataccagcagcctacgccacttgaaggtatttgaaaggttgcatgcttagccacaggtatgattcgggtagtggtataggctgatcggagttcaggagttgtatcatgtagacaaatcgaacaatgacctgatacacagaatctagggagaaagaggccgaggtacgcgatacgaatattctggtgactcatcgtcgatagtagtcatgtggaagggacagagagcatgcgacagtatttgtataggggagctcgagcagacaagacatttgttcgcgtggtattcgactcgagtgatagaaatgagggtgttctcctgttatacgatccgagtcagtaaggattgacctagttggacgagttgccgtagcgtacctgtccattgaaatcccaaggtgcgcttgagacgggacaatcagtttgcacaatggttatatcggcttcacaactagattacttacagctctcagcaatgcagttaccagccatgccacgtcgcattcaagcttatcgcaatcggctgtcgcttaaaaagccgcgctggggtatataagacgatttgttgagacagtaaatgtgtgttacgaacccacttgcgttaacattgtacttctatggtggatgaatgtgttgcgatgccagaggttcaggactccacaatagtgcgaaggcggtggggacgagggcggaagacgcgatggagcacgctcgtcggccgccaccttggtcttatcttcgatttggcggaataggccactcgccatagtatatttcaccatcgatgatggggtgcccctacaatagtgtgaagatgttagtggtcattaagatgaattggagtaggaattatgctcgaggggcatttatagctgacaattcacacgaggctgctgttatttttaccagtgctttatcacctaggatcgactgcattttcgaagagccagtgaacagttagttcaactattgatgctcgatctcgccagctgctcacctcgaattactcaccgatatacgaaaaggggggggggggagagtaaacgttgtaacatcgttaccgaacctacggaagggaaggtagtttgtaagtgtacttctggcgcattgaatattagatattaagtagacctcgttgaaacttaaccgtgacgttagtttgactgtaaaacagttggaacggagaaaagcagatttagtgcgtttgagtataatatagataccagttgacgttggtaaccgccagtctcgcattatactacggacctactaaacctaggctactaatgcttcttcttagtgaccgcaccaaaagcgtttgataagtgttattatattattctgttttgaataggcctccgtatattattgttatttccaggtcccaacgatctcctcaaaactgccgtcctccttccatgtaccacgagcacgttgacaatggatatggggaaaattcgctcttcgggattctaggggcttaagcgaaaattctatgaattcaaaaatgcttttcttctcagtatctgtcgatcaaagtccctactccttcagttgttcctatacttttactccttaatttgaccacataagagtggggacgcactggagaacctgggggtggggcaatgagcgcgacacaagatttagtgtcgcgctactcctgtttatccgtgttttcgtacgcctactttaaggagacaatgtcaatgagagtttcttgatagagctatttagagtatggaagtgataacgtgaaagaatgtagacaacatgttattttcagctagctcagttcaagagtgaaagtcccttggtcctgcctgcccgaagaaggctccatatggaagagggaactccgtgagagtaacccacttttggtcctaccgttacgattgcggatactacgattagtcatcaccctgaaagtcaatcatcgactaatgtaatttcgtcaacagtaagctggcgaaagagccaaaactaagtccaggaattagtggcaccctgatacaaaaagcgtgtcgcaacgtgtgtcgcaacgtgtatcgcaagggttgcgcgcgtactgcctcggcttttatcacaatgcaccaggggactatttaaattcacaactgtaccataccaaaccatcgcttttcataatagcttagggctgggaataacaacctttatattatcctacaatccttataaatatcaaaaacatgaccttctctatcttcctgcttctccctagcgtttacatacgcgctgccttctgtggcatatatacagttatcgattatgatcgccaatgtatgatatggcctgatagtaactatggctgcacggaacattcagaaccttttgctctccttgatggagatgactgttctggtgagtgatggctctacctatatatttttagtattaacgaagccctagatctcagcaaggttacatatggtatccgtaaggaccactctaaggtcgatatgggtgtattcggcacagtgtgttggcagctcgtgtattactcccgttctgccattatcgtattcatcagtatcgtctgttttagacttgtcttcgtgggggccgtctccatcctccacctctgaatcatctagatagatctcaagctgtactaagtcaggataagagaaccattgggcgactatgttatagttcaaccgccgtccccggctcttgaattgacccattatcccctctcctcttttgttctgggttttgcctaccggtgtttccatatcactagcgtgaatgcgaaagaggctttcttgagttgtgcttctttacgaatattaggttttcttttgccgagtaacctcatttgttaaaaccagtttatctatttgtatgtacttgtttggtgtaaaacgctgatttggtagcttttcggattggataatacagcgtggatggacggataaatgaatggatggatgatttcatttaccttggcccttcaggaacgatatttattcctacgatcatgtggcaagaatgtaagccgagatagaccaggttacatcgatccctgacgagtgaaataagtgtagattgcaaatgatgtaagagaagtattctgacattcattacaccaaatcaccttgcatttgatgggtataatatgtacttgtcaaatccttcgggaactagaggtctattttcctttgaatgttaacgcagtatgggcaagattgactatagccctgaccttttctaccgtgagcagggtctaggtatcgtgaaacttctcctaacacgaagggcgattgagtatcaagtctcctagcgaatctctgcatcttgtttgacaaaaatgttggcattattacgtgcaagatagtgactatgtggtcatatttgcatacgagtcgagctacaatgaggagaatgaggagtattttaagataatgcaaatatatgctacggacggggccaagccgctgaaggccctacatgacatatcctgccaggggattggggaaccttgtgcaaattgcaagcacaaagtacgctgtgaaaacctggccaggtgctatgaccctgtgcctacctatatgccatctttatcgctgccattagtggaaggtctggtgtcggtcgacgtgcttctgtgcgaaagagggccaaaagctgtacaagatcatgtggttgccaccattcaagcaggaaaagcagatataactgatcatggcagcgagaaccatctacgtgtacaatacatgtacaagttcgcttcggttaacaatatctctataggatcgaaccattcttctgcagaacctcatccagaggttccgcaaaatgatctgactccattaatatcagtctcgcacgcatatgtgaagggataatccgtactcctttcatccgtatgtgggataaatagacgcattgggatatcggaaatcttcagccttcgaagtctcttatatgccgatgcggaggttttgactattagagagcaaccaaacgatccaacccggttcataaaacagattgagtgtacggaaaggggacatcacatatgaaatacttggctatccccgggatgacattggtagcttatgcaatgacgtactcgatactggaaagctactcaagattgattgtgtgtatagcatctaactgtgctcatgttttaggtgattgccacacggtcgaggctgagccaaatcgcgtaccccggtatatggtttctaatcatacgaaaacggcgacagggataaataaatctatgttaacccacaatacattctcgatatctggtcgagcggcggccctatcgagtcgggtatcgattcgatgctgatcacatcgcgaaatggtctggcggcacggaatctggttggttgggggagaggggtcatgtgatcgctgttcagccaatgaacgaggaagagtccgccctattgcggacaaggatcccggctccccactctggagaggacgagaaggcactggagcaggcactggagtaaattccgctggcaattacccaggcggggtcctatattgcgaatcgatttcctcaggtcacggtcccccggtgccttcagttgttccgtgagagcgagtcgaatcaggcatatcttcttcagcacgaggacgctaaggacctccagcgggaacctatcattcggcatgcggtgaccacaacgtggcagctatccttcgaacaaatccaccatgaccggtcggcggcggcggcggatttactggtgttaatgaacatgtttgatccggcaggggatcccagaaggcctcgtccgtgccgatggtaataggctccagtttgaagatgcaatggcaccatcgatcaattattctcttgttcatatcggaagtgaaacagtgtcatttgatatgcaccgacttgtacagttgtcggtccgcacctggcaagagattcacctcgagctggcgcgatggcaagagaaggcacgagcgaccatggcagagatgtctcccaatggggagtacgagagctggactgaatgtaaaaggctgcttccacatgcgcaagagggggtaaaacctagtttcaacactgatgaggatgattccatgaatgatgccacgattttatctacctgtggatggtatttacatcgccaaggtgcttattttgacgcagaagcgatgcgtcgacgggcatttgtacgacgagcgaagatgattgggccggagcatccttacacgctcgccagtgccaatcagttaggcttagtgcttgacagtcaagagaaatatgaggaggcagaagcaatgtaccgacaaggactggaggtccgagagaagcttcttgggccagagaaccttgacacgatcaatagtgtcaataacattggccatctgctacgcaagcaagggaaatttgcaatggctgaagcgatgtatcgacgagcatcatgttacggccaacagtgtcaataatgttagcttagctcttggtagccaaggaaaatcgaaagaggccgaagcgatgcaccgacgagtatcgggagtatttaagaatctgtttggacgtgagcatccccttacgcttacgagtttcagtaatctcggggatactctcgacagccaaggcaagtatgaagtggcggaagtgctgcatagacaaacactagaagcacgagagaagatgcttgggtctgagaatccggacaggcttgttaatatcaatactctcggcaacgtgctcctcgctcaagggaaatatggagaagcgggaacaatgcatcgacgggcactagaagtgcgacagaaggtgcttgaatgtgagcatcccgatacgctcactggtgtcagataccttggcaatgtgctgtccaggcaggagaaatacggagaggcaggaaagaggtatcgacgggcactagaaggatatgaagagatacttggtcgtatgcatcctgacacgctcacagtaacattcgctacgtgcgctccaagcatgggaaatacgaagaggcggaagcgatgcatcggcgggtactacaatagaatgacatagagagacgtctggacgtgaacatcctgttgtgatatgaggttggtgcaggtcaggaagcgagccgcaccatcggaattagctccgagatgtctatacagacaaccaagttgatttccaatcaacttggactttgtggcgtatatatagcctcatgcttccctctaagtaaataagcaattgatatacctcttgaattacaacaccgacaacgggaactttgccaaaggcgctgtatgtaaactgtggacctaaatcaaagtcgcggataattagaacaaaaagaaatctcagtctcaatgcgagcgaacaagagaatttctttgagaggttgtcaagcggacgaagtccctcagctcaccagtggaggaagggtgctagacaggagcttcggagtaacagatgtgtaagctatgcagaaacttcattgcgcagagatcagagcagacccttgggcgtatcaacgactaggttattttcacagccgggattataaaacgactattccatctcactttcacgataagcaagcttacgccttatatgctgtgttcttttatggcgggtaacgtgtcagacttccgtgacgtagcttcccgacacacggccattttccagtaccccaagcagatttagctccaccaaggaccctcctagtgacaagtcatattatgaactgccccggatgaagaaaatgggagattccgcgcccctatacgtctacaagattgtcccttctacaaaccctgttcgagaaccgcttcccgagcgattaccagtcagccatatcgatcaatcttcagggttcattcaccttttaacagctccgcaagtaccaattgctctcaaagctatttttgaaagtgagccaatggtatatgtcttccggatcccgtacaataaagttatgcaagacattcgttgggagacagcggacggtgcattgcgcgaggctctgcccgaagaggatttgtgtccagtaagtatctgccggcgtatccaaccttgggacttaagactttgtttgatcccgtgtggcagaatgtgagctcaccaatggagtagcatttgtacaataagttcaacctaggccgagacgatgtcgagagcatcgctgtgtggataaacgagaacgggtgggaaaaggttctatcgcagactggcacgtggcttttatattgagggtagcctttccgcctatcttgttaatgtgcttatttgacaaccatccaattgagttgcccttggatgaactgaaactgttccacaaatcaactgcctcatccttcctttaacctcgcaaaaagggcttcagtgtcacccaagtgaaaatcacacatcttgaagcagtgggcatcaccactcagctagactagcaggagcttatctgccaaaatgatctttaccctacaccgcatcgccggtcggcacgactgaatgcccatcgattgtagatggtcacggttctctgcacggatgtgacaagatggagttggtatagagaagtgataatcatccaatctcctgtgacgttgatcagactaagaagcccgagtagtttgcgagggaagcagcttaatccatagccgggatcaagggaagaagcaagtgcggcgggcatacttattacgatattggtctgttgattcaaatatatccaccaaatactctggagctcggaacaaggcattctgcgggtcgtagaggtttttcgtcacatgtgttagtcaactaattagtccctattattgtgatatcttggatacgtcgctgttaacccactgcaaatcccagtggcagttgtcgactgcccaagcagtcgatgcgtgaaatgagggatatctctttcgatcagatcttagctaaggagctaattagaactgcatggtgctgtgccagcataaatctgccaagggtttcctatttcggctggataaaatgctaggttggcatgccaggataccttttttactactgtatccgcaatctaatcacatatctgtatcaattcatttattttatattagacccatccaaataaaatggcaatatcagtgttgtatatactcgaaaatccaatagaatatttcggctgcagtagtactgaagcgaggcttagtttagatgtcggataataagccaataaagatcgagtattcctagtttacatcccgtgattatgatctacaactcttatagtacttattcccatataccaatactctccctatttgccgccggttgcttggcacgctcctccaatataaacgggcctttttttcactcctttactatactatcgcttccttcgttatttttgaattagactagcaggctacaataatgcagcatgaaggagctatcttgatctactgagatgaaatgttcggggtgagaatcaaataagtggatttgtctaacctaggtaaacccccgaaaaaagaatgctcttttaaatacatgcttgggacccggtttactatgcctacggcacatagacctctgtcgatcaggggcaatcgacacgtgtggtgattcctattggcttatccacatgggacaacaaccaggtcagaattatggaggtttgcgatgcacctcaggaattgaattcccgagagaatataattaaggacaattctcaacattaatgagtcgtcaagccattggttcattaactaccccacacccaaagccgaatcttcacctcaaataatccacgaaccatgatcaacggcgaccaatattctgacgtatccgcaggggaacagctcactcctacgacatgggtcggaaatgaacgccgcaacgtctttgaagacgtcgttgcagatgagaacgtgttccaatttattggctctacaaaggggcatacaacgaccgcaagatcagtcatagccaagacgtaggcgacccaatgtctaggagatgcgtccgaaactacaatccagcaaatttcaaaggaccgcatcggaatcgcggcgaatattcaacctcctcatcgccaaccgcaaacaaaacctttcgacgggcccggtcgcacagtaggttagcaatgccgggtattttacctcgaaattctatatcttcatcatggatactctgatcagaatcgtcttaagattaaaagtacacaagggagggaagggggaggaaggaaggaagcgttagcgggggtattgatagttaagataaatgatataaatgggatgagatcgtcatgacgagattaaaaaagggggggatgggagctaatgagattatgcaggttccaagtctacgtgggcattggaatagataggagaaagggcgagagcggataacggccgagtctcctcttctcccctgcctacaacatataggccgaatctagaatttgatgtgcatggatatgcatgtaacctggaacctatactagaaagggtgaaatgatccgtgtacttcgtaactttcttatctttgctaaaattaagttcctagtatggatggcgtaaactatctccaactggcatggcgagtcatccagaagtatagtctcataatcttataggcttgctatataattgttcaatttattacttaagccacatagggagctagatgtagatattctgcgtgagtaacactcttcaaggcttgagaagcagcggggtatctataatacgttacacgcttacacagaagcaatgtcggttttcctcaggctattcgattcctagaagcggcttttgtgttccattggcagaataaccatgtcaacagatgcagttatccgttagcaacaaagtagtgagcaccctccgccacatctactacctttccgggcttccacgcctcattttgtcattcttcaaatattatcatcccgccgcaaacactatgtaccagtgtcatgataatcagtacagatccaaacgtggcttcatcaacagctccatagtacatgactgcacagtatgggagcctgtcaaaaagctcagaggcaaatcaagatcggtgagcgctgctagcgatagagcctgcaaaaaagtcgatggctaagctaagaaccacttggatgcagccgtaacagattcgagcgttacggtcctcttgtagcaatcgcagggagaccaagaagactgtggtcacaaaaaaagagccccggaggccattcctaattatggtaaaatcccgaatatatggtgtgcttatagtttagctttgacctacgctacgctagcacttcccacagtcatcgcagtaccccccaactgtacagccccgttgacaattataaggccactccctcctgtaccagcactctgccctacggacatcgcgctcccagctgcaatatttccgatccaactataaacggcagcggctgcagaacctatacttcgtaaagaagggtcattcgagcttcggggcgcgggaaacaggactcattttatttctcctacaaggttgcacatacccgcctggatgccgcctactgtgaatcctatactcgatataattagggctgttgcgaggccaggggcagcgagaacaacagtaccagtagtgccgacgaccgcgcaggtggctagaatagggttctaagcaccccagctggctgcctggcatatttaagcactagagattagatccttcccggtacatggaagttgtatatgaacctgagtcgccaagttggcggactttacaagggcaggcttgccgtaggttacgacaatttctccgcctttctaccccgcgtgcacaattctagcgcctccggagatgacatcccctggagaaacatttcggaaagtcatggctgaggtgggcaattactggactattcggggggacgaagctgtgatcgtaatcagggaaagatgaagttactggagttaccagaggtgcctgcctatgacgcaagggattcctctcgggcctacgtaaccccggtaaccccggaccaagtacagggattctaactactattcttagtagtaaaatacaacataagtaacagcaaagtagcgaggtgctgcgatgtacgtacttcggctatttgctggtaagtgcgaaaagaaattattagctttcgtcccccaatatcggaacttcaaatcctcgtgtaacaaccgtagtcatggaccgagtatatctaagacactcgctggccaatgcatagacgtcacttatccttaactcacgcgaaattgatggaattaccccgagacgcctctgaaaacctaccattggaacccctcaacatgcggagaaatcacctgcgcctcagtccgcttatgaacgaccccctcactcctttgctggccatgtacgacccgttgtctccttgttcgcgtggtcgtttcctaccatactcaaagataccagtcaccttatctgacggattgaaggggccgtgggagggtaagggactgggcgccataagctcggcgacgagtcggccggcgaaggtaagataaggcttgtatgggacttttctccgtcaaattgtaggccatttcatggggcttgttgtaaccctcggcttcctaagcctatttagtagctcgggggtgatttacgtctcgtaacaaaatatgtattcccagtctaatacgttggtcacgagaagaggaagcgaatcagctggggcacgatagatatatgaagaaacgaacaggccagaaacatacggtgtaaatttttggttttgacaaatggagcttgcgctcctgtagctgcgtaagagccaataagtgatagagaaaatacggatcttcggtccatttctttagggttgtctgagctagtcgctcctggcagatactcgctccaacggagtttataactcccattggtcctggataaggctcaaactgtctccttcgatctccgttgacgcttgtgtgatgtatatagcctactaaccagggggagctattatggatgtgatcgatggttactttatgacgataaaacacaatatagcctggttagttaacaggtcgaccttgaaaataaaatggcgctccttactgcttagtagggttgttagtaactcctatggaagctgtcctgtcagacagtagcttgtacctagagtaggaaaaatgacgctccttacttactaaaatgttgatgagacgacgacgctttataatagggaataggttcatagtaactagttcagtatcgtttgatgacttccggtaaggctttcgacgatcattgttcctgtggtcgttttgagtagattctgcacagatagggggagttccgatatcctcgaatctacaccccaccaaattaaggtggtaagaagtctactgcagaagattaatgagggaatcacggtagtagagcacgatatcacgaaacgattttggctgaggattggccgctataatatagataacaatcgcgatgatctttgcgatatcggcattattataataatgcctaatcaagatttccactgcctatcgggcacctctgcccttctttgatatatgaccgaccaatcaccttataatactgggagagttggacgcaaactgtaaaccagactatgctgctagttaggccagtaacgaccgcgaattaatacagtagttagtctagatagggaaatcactaatgtaactattttcatacttcaactatattaattatagctgtgtgttcctaacagaactcctaaaatagagaaataggtctgagaggttgtttaagttttaccactaatacatttgccatacaatcgctcatcttataaaatacctatatgtatacactactgtgaaatagaaagataattcttatcgctttatatgaggtatctacgttatccgcaggagaatgtcaagggtttaggcaatagctgagccgctaggcctctatagtcgccagtcacaagagaatgaacgtagctttacctcgagaacgaccatattattgagagctttggcttaggaatatctaatcggctccttatataggaggcgtcgcaactttataaatagttctccgtcagtaaatacaatttgtgatctcccaatctctagtagaagtccacttttagaaaagagttccagataattagatagaacggccaatctatagattctgcattaagctttctgcgagtaggaaagtccgatcagatcttaaaataaccatttttataccagtaaaactaccattggatgtgattctagacttgttgtaggactatcaaacaatgttcacggcaagattacagccgtctaatattaatactaggaatactatttactatttatcactgctataagggcaagtcatgaaataacacgactaccagctagcagggcacgaaaccattatcgacgaggtcactggctgggtgacattgaattgaagaaagctgggagtcatttgtggggactggcttggtactagatatacgaaataaatcgctttgcttatatattatttgtcagttaaaggatagaattacttagaaatcattcgggcaccgtaactgaatagttcctagccgaaggtagaatctgacctatactaggcctagatatgatagatcactctagacccatttaacggtagactggtttatgcgagttgtggatataaataataggctcgaggtatatacccacgctacccctatccctactcgggtctatatgactagtgttattattcagctcttataatcacttcgctatatgttaccctcaactccaatcaaacgtaaattcgcttcgcaaaacaggctgcacttgttctatatatctgtgtcagggaagtaggcatgatgtactcctaaagtgtaatgttaacagtatactatcatattatctcccttcgggtgttggctgtcgattctatctcgggcagtggcgtaaaaagctcctgcggcgctggctgaggctttatataggagctgccgtctggtacttgatcccgacttccagttatctcttatagtgatgactgtagtcgccgttggaaaaggacgaacgcaagtgcagatagtaccgctagtccggcgacgcttatgccgataccggtccctactttcgcgccagtcaagagtgcgctagtatcagatgatgcggtctccgaggttggagtacttgtcggggtagttgaggacattgggataaatgaggtcgctgaggtagatatggatatcgtcttattagatttcatgtagaaccccggggagtataaacgagggttagaaggagtaaagcttttcctagttggtttaaaagtgagcctatacttgttggtatctgatagcgcttccttattaatagcgactttctagacaaaagtccctgagtacgaaacatctattgtactagctattctgtaatattgtcagtctagtatcttatggtttttgtttagggatcatatactcgaaatctttttagactatatggagaaataggtgttctatacattcatctacagatcgctttactcgtgccgttcatatcacgattcaggatagaagaatcctaacagaccagtcaatggttaacgtagacccgatgtaataggtagtaacgaagtcttcattgtttccgctcggcgttctccaaatagttcgggttggcgcactttatgctacccgggatactgagatcatgagcagccatacctacgctatattggccatgaagtatagcagaaatgggagctcaccgttatcctataatgaataaaatgatgttgtttcaaacctaagaattcgagagagggaaagcggagggaccaggtcttggggaggtttattttaggagtcggaatagtaaacattcccctaagtcccaacccttacgaggtgcgagacaactagtcatttctatgtatggcctataaataatgctaagttaagtgtgcactagcaattagttgggaactagcaaccgaccaatatataataatgaatatgactacgaatgaccttttattttcctgtttaatctacggtttagatatgacgctattctcattcttatcttaagctcaggaactatgcgtattataggaccggtctttttgtgcgccaagaataaactgcatcccttaactgtcgggatctgccgtttaccgtattccgtcatattttcggccctcgaattgcgtccctcaagcttgcgagtcgtgtttttctgccaataggctccgtcctagctctactgagataaatccgtgtctccttgtgccaccgtttagacaaggtaaaagaaaaacttaactagcatttttggcgctaaatcattttccaaatcaagcagagcagctagtagcttctggctaagctctaatagcgtctagcacttgtaaagaagaaatggctgtgttatactctgggacgattaggactttatttcttactaagcttacttcgaaaatattaccgctatatcctctgttactgaccacagtgccaagtatctaactacattctatcacgagtaagtggtagtcgcttatcctattttctatcttactgcgcctgtaacctgtgatatctccttttcaccgtaattatttctagtaacagctacttttgcctttagatactcagtgagagagactagtaagagtataagggacgctgagttagtcaagaaacgttggctaactgttgaatccttcacggctctcttaattggggccctgagggagatattctatccacaatgacaggcctatatttcttgtctaggtcacctcgtctgtgagcgatttaacgttgaattatcgaaaagcgactacaattttatccctagaagtcgtggtctttttgcctagccccgctttagtgttatgttggttgcgttgagctgtgtgggtctgtctatctagactgtagaaagcgaggttacggtaggatatacaggtactcgacccgttaatctgttaaggcttagccatacatcgttaacacttatttaccgacagacctatagcttaacgcagctagcactaaagcgaggttaggaagacagtggccatgatttttactaatgaaatgttagacactctttggtcatttaacgttaggccgttagcagatgagatgtttaaatcataaaacctgggcgtgccattcttaatcaaatagctcccagtctacagtaagaccgcaagttaaatactatggaggattctataagccagccaaagtttcttaaccgatattcttaatacgaccctagctctttctaggtacgtatctaaaatggcattaagaaggttgccgccaatagttgtggtaaaaacgaagacaagtttcgataggcctctattagataggtatcattcgatgcttactaccaatcagagcacatacgtgacacgatgagccgggaagtctataaataagtcctttccttacagcaatttgctctataacttaatcactcggctgcacaaagtcgagcaggccttatacctgaaggcgcttgatgagttattcccgtttgaaccagcactggtttttccactctgctgacatttgtagaatatatctgggagtagcaagccggacagtatctgtgagatatagttcctagcagatctactggattaattcactattatacagatatgatttacactttagttgagtggaaatttctgacctaggttcggatttaaccgcaactctataccaccctcgcttaagcagataagtagatttcccctcagtaatcagtcaaatgtaggcctctttattaacaggtgcattatcgaatttttcgcctcgaaaattggctttgtcaataagcttcatttactgagtgacccttctgactattattctgttctatgcgaaaggttagctttttgaccgccttacctaggaatgttactgtcttcagtagccggcatgaatatagatggaatgaataccttagtgatacatacgaaacgatcaaacctaggagtatatgtaacctcaaaggctcgtataaaaaatgtctcatttatttcgccgcgataggagattgcaccgagcttcttcaaagcctattgggcctcggagctccatttagctatcgtgattagaataaacgaacgtgcaaaacgtgcaaaacgcgcaagtgtgctaaatcgattgagattcctctaagaatgagaatgaggttaccaagatcgacttatggccaagtaaaggccaggaatatctttattaagctttccactgttattatcggccttaaagctctagcagcacagatagttatacgcagtctttctagacctaaggctgccagaattcgcggtctaagaaagccttactccaaactatagataatggtctatatgagagaagatttgggatttgcatgtatagtgccttataggccataaaataggctctagtttactgtataatgggtaacctcttcattctcagcctctttatcctcagcgcctagactattactggctttttccctgctccagctcccttacggccttattatatatatggtatagggcctatgaataattgcgcagccttttaagtttatagataaggttttcccgattgtgtttaagcagtgataccagctccttggtctcacgaagtgaacagtagaaacgtgctcttccctaatgaagcgaagctataccaacttagtaaggatatttacgcttttgtatagtagacttacgatggtatccgtaaccgggaccgggcgtaagggcagtggatgatacgctgtctttattagtggttattatgcagatttcctttatggtatactaacagtcggaactcatatgggttttatatatcatggatgggactgcgcttggatatttatacctagaccgagtagctatagaatatcggggagtcgatatgcctctaagtctgctcctaggattgaagtcgtgcctcccaggacctagaattggccttgtcagggatatacgtaagcgtcctcgctgagatagaaattcctggattaatcaatcatgccaattacttagttttggattgttgtacgagtattatgtaactattttaaattacgtataagatctactgttcgatttacttatttcttcgtattggcacgggaggtgaacataattcggtctatctactacaataaggaagctgatcacggctcgaaataatactggtcacaatatatgattgcccacaaccattatcgaccgtatcttcgacctcaatgtatttacgatccgagcagggagcccatgttagggatagtgtaatttcgaaattggccaggccatttggaaatgggttcaaaatatcggtttcaatttcagatttgatctgcaaactttaccccaggttaagttagcttggcctaattggaccagttcggattccaattcaatgctagccaaaatttgtgaaattttcatacacttgaaatttcaccaaccatccctactggatgttgatatagcaaacaagccaaaaagacggatgcctgctcgtttgaagattggcgggacagagagcaaaccacccttagtaggcgcagaccttttattaagagcgaggggtcacatttgaatggtagtagcttcttcgacgcattagattatatctaacatcatcggtagcgcaaagctatcaaattgcgcgggttgctggctgcattaagcgtgctatcccgagtcaaagcagaccgaaagtaatctctttttagttctacaacctgccgggtcggttgtgtgagaacaaagccttcgggtggccattccgtgccaaactcattcttgagggcacttgagggaccacactgcgtggacgagtaacaaaatttcgttactcgtgagtcccatcgactgtactggatggatgtaacaactgcataattgaagccgcttatcgcctggagaatgtccggatcctcgatcttcacggctcgggccaacctaggggtatctgtcaaatttcaagacaccaagatcggccatcaaaagttgaccactctctccagagagccatttggcttgtcaactttgcagtcaaagctctgtgatattgctagagtcttcctctgcgcgagatggcaccgtcaacggcaggccgaccaagttggccagcggtggtatgaagcagccatccgcaactaggcgcaagtgccgcatggctctagagttgccgctccatccattgcgcatctgggccagcgtcagatgtcatcagtctccaggagtcgccctgcatcaggcaacaccgacaggtcacctcacgggctcagacaagatccaccggtgcggctgtcaaccaaccctgagccagtgcaaccattcaatccatttgtgacttccacaatgctgcggacaaacagtgttccatggcatgtttcgccggctcaaccagcgatcctgacatcggtcgctaacgtctgggctggcgtctaaagcttgacgctcaaggatctcaccctgagtgacgagttcgacgacatccactgtgtattttgtctggccgaggatgatgaccttgcaaatgagagtgtgatcttgcgctgtcagtgcaaggcgctttcccacctggcctgcgcggaagagtggctggaaaaacgaactacgggttttgggacgtcatgctgtgtgtggtaagtaggggggctggttccaggtatgcaatacccaagatgctgattaatacagtcgaaatgaagggcctttagacgctttgattcgcccaatacgagtccaatcgtcggatgctgagacacgtcatatccacacggcaactgaatcatctgccgatagagaacttgccactatcaggaattcatcaccaaatgacccgagtcagagccagccgcgtcagcggtcagtgggaccccaagtgggatcagttgagcagagcgtggagaatgggcccccgtcgctcggctaggctagtaggggcccatctaccaccaggcccttctacgtctgcaccgccccgccggtcagcacgactaaattccactcgaaggtgatcttagtttacagcgaaggtgtgacgggaatgagaaattagcgaagcgactgtttcacgcgtgaagacacgtgaccagacacaccgcattcggcccagcaacaaagagcatagccgtggtatggagttttataacaagtttagaaatgatacaaatgaagttctggatgttcaaactcgcagagcaccaaaactaaaaccgcgcgaccttttcatctttgcaagtactagatgccaatgcacccccaagaactgttggcagtttcgcttaattttgggatatttttttagaccgaaaccatattcatacccaacggtggtggccaaagaactgtagacatggtttatctcagtggtgcgtgtcgcgtcaagacggagactgttggcagaagataacacatctcgggccggcgaaggaacctggcaaactccgatgctggttatattgactctgggaatcaatatgttgaccctgggaaactcaaaagcatttctaggagctgtatatcccctgggaaatacaccttagctcctggggcttttaccaatctccaggaaaattaagatctacccctgggatctttgctctacgttcctgactgaatacacactggctctgggaacacattggttagatctgggacctgttgggctcctaggaccctacttctggatcctagagtcaatattttgctttttgaggtcgcggaacgctctcacaagacacccacaccagacctccgcacaaacctgagacattcgaccactcccagaaggcttagtcatagccccaggaaccgcacctgaggttccaggagtgggtgaagctgccaacaggaacatgactttaattcctcgaagtgggggtaaaaggccccagaagctacgtcgggcttcctggggtctatttgacccctaggagctgcttatatgctcccagaaaccgcactaaaggttccgggagcgagagaactcccagggccaagacatgcgttcccggggctgataaagctgccaacaggaacgtaactgattttgtgagtggggatggagagtgtacaagttacgcacgattttctggggccatatgattattgggctcacatgttccaaggtcaatttctgaagagtttacggcaatcaaggtagatggatgtttatgcagagcacatcgtcagccatcatctgtcttttacatcaagccactcagaatactgctccaatgttggccaatatcggccggctagtcaggtcaagcgacgaacatcctttgattccaattaggaaattcaacatctaagtcatctccgcaactcagaagtgtgtctattcctttccaacaccctatccgtcgcgcctctaatgtctatgggctccaccgtcattcttcgaaaatcatcatataatttagcaattgttcttgttcgtaatacctgctgaaccgttcttcataaccctactcctgtaggccgttggaaccttcacatttactgtgttgtaggctcggtgcgcgtactttgctagtgaccacgtaagtcgagtacgacacaacgcacaaacgacaaagtgaccagtaaatatcccggaagcggcctggccaatggatccataataaataagcttgtaatatgggatgtggtccctgtcaaggagctcaaaggatgcctgaaatacgtgaacgcggcaatccaagcccctaaggagagcacgatcatgctcacgacgatttaaatgcaaccgtagtaaaaccgagcggcgcatttctcttgtagccacttcggatagaccacgaggattaacccaaagatggaagatagggctgaaactagggccgcaatcactgtgccgtcgacgacgtcgtccatgagagtttggaatgtgatgtccaaaatagagtcgctcagtctcacgaggtcggatttgcacggtctcgcaggacgaccgccaagtgtacagtggacgaactgagactggcacgggccagccaggtgatggtaaggaaaaccatacgaggcgcattcgaatcatggcggtggcagtgctcgcaaggacgggtttattgagtgtaaagaattgaggcaggtgctgctcaagggaaaaaaaaaagtaaagagcgggaggtataaagatgaagaaggtcattatccccaggcactgtaaaacttatatgtgatcttcacgcaagtctgcctttccaaagaatgacccagctgatactgagctccgccacaggcgttttgattacctggtgccttagtggcagccaaaataggctttgactagataaaaaatgttccaagttgaagcactactcctatgcgtaaggcagatggcccccacagaagtgtctgatctctcagtacgggtcccgggaaatcacccgtttgttccttgtatttactttcctgatactatattattaacctccttaatatgtgtcgtgtttacgcgtgacatctttcaaatttgaacgtctgataccgacgtagtttgccttggtctgtttgcgatatatcactctgctgtactcgaggaaactgcggtttgctgttgattgcaagcctacccaatagtccccagaaagatgtagtcatctcttttctatcctcttttgttgagcttgtgcttaacagccagtgtaggatgcgcctctaagccatggcaaaccgtcgctgttaggtgaaccaacgcggccgattaggaaacgggcttcgagtgggaaacttaatcaagtcccaatattggcaaagaaacaatatggcttaggtggatatcttctacaggcggaaaactcacatgctcctggtgttcaacggtgttttatgttcaacgttgatgtgaacgttgattcaactttctgacatcattcaccacccgtatatcgcccaaggtgctggaatgagaacactcaaaaaatactatcaggtcggcacagtaccaacaaattatgacaaagaagttaaagtctccagagctcctggaagctcaaaacagaccctcggccggtcggatctttatcgtggcagcgcggcgcggctgaaccatcgccctctaacaacccccaagtcgtgagaaatgggactcccttccacacgccctatgagcaacaataatttggcagccatgttcctcctgggaatatgccctaaataaattggaggctcgagcatcatgtggatacagcaactggattaaaatatccttgattcgatcgtgcgtgtacgtaccactattgtggccatatattgacatccatagtcctcctaggagccggcgctgataataataacccgcaaaaccttgactgtgggtggtgggcatgactgcttcagccccaaatatttaaaaggttgtaattgtcctcacggttgatgatttcttgtctatcttttgctccaataagttgctagtacaacaccatcaccaacgaagccaattaatcatggatcacaacctatcacaggttccaaagaagtccaataccccagacacagaaggccataatggacgtatatgccaaactggtatagttattttagatccccttctcgaggaatccatcgactaatatacctatttcatgaaggcaatgaattggctgaaaacttccgtcgtgtcaatggtctatttatccacgggaatcgcagccatataagccaggttttacaaccgcctattggccaatctactggccctgtagctatagaggcagttacttccgttggtacctctcttagtagcttaagggcctctatgttatctctaagcgttataagggctaaaaactaagacctaccccttctgaacgtaaaaaagagagcagccgaatcctcaaccctcccacaaaagcgacgccgggattcgtactctacctctcaattaccgggccacctacaactggcgtatcaaaagagacccctatgccttataaaaattagtaggaaaatggtcaataatacacttcaatacctacaaatgctatccgaccgtatcttgatctacgataccatttcccctagggagtgggctactatgcatctcaccacccaattgctatagagcaggtacgaagagatcatcgtaaggaaagagatggaaacagacgctgtgcccgattttgatttaccactaacacagccagaagagaagtgccggaagtgtactgctgcagacgaggagcggctgtatgactgagacgcaccccgttatttttaccttatcggctatattttgatagtataaccggtcatttgaacttaaggagcaattatagtgttatataaccattaatcggtacttgagaacctgttgagctccaaatccatcagtatataactaagggacttttaggtacgaaggatttgaacggtttcctgtgcgatgttagtacgcttagtaagcagaaagaaatatgcaaaaccagctgtatcttgatctccaattaatacaatatattagagaaatcagatagcgcgtgcgaggccaatcggggatagcaatgaagaaatagcaattttgtaagttaaattgcctcgaatatcaaaatcagccacttcttatattattcaacccacttccttcgtaatagtgcaatggctccgtgccctacaagtatcgaaatatttgtgttattccgttaatcagctcttgactgctggtcctgataactcgacagtttggcagtcattttgagtctaaatgtcagcatattaatccaagtgactcaatatggcatcagttgtagactatattaaactgtagtattggtaagacaggtaattctagaacgccgaggcccaaatcagctgtgccagtattcgtccgagaattgtgagagagcgactcgccctactgaaaagcgagcttccaagccacaggcatacctagccataaataagtcgaccggattatctatcttcacctggccaacatggtcgttgcagcgtcaactagatgctggtcgcatggaagttgcgagtgatcattacatggccatgtaaatgaactctgtgcaacgcaataattactggcaagtttgccacttcatgggcctaccaattattgtaataaccataccatgtctgatccgatacgctcgttgactcaggagtgaaccatgaggccgccattacaaagaagctgccgcagactctgactcgcttgatagcttccgtctctttatttttggcgcgttggcggtcataggaaacctaaaatttgtccgtggacctcctgtatgaaccagcaacagacttgattatcaaagggcgcttttcttcctgctgctttgcagctgagtacccacatacccgattttgggcttgcctcgtacattctataagctgtatataccatgtcgagaggtgtcagcctgcatgctcactcaaattttgttatcgtggtatagttctgtgatttaacacgttgctggtgctgattgttggaaattgtgcggaaatgctgatatgatggggcctaatagcaacctatggcttaatacttactataactagcccgttccttatctataaaggatccctatacgatactctacgggtagtatgcccctaaacacggctagtaccctatacccggctagtacccgtccgaccacagacgcggagttgctcaaacccatggtttcggtttcgggaaagttggcggtgaagccagcgtgtgaacgactgcggtcccatggagtgtttctgtccaccgtggagtttctagttgggtcaattgatcaattgaccaccctcaaaatgacactggactgtggtgcaccagtcacttttgttcctgcgatcttgctatcttaggagccattttcatcattgcaaatgccaaggaggggtgtaccgtacgagcagagtgctgaagctgcctggataactcggttcaaattgacagaatatacagagtgataaataaaaacataaagcagggctagctactgctctggccaagaaagtggctgggaagtcagaagatatcatttggtaggaaaatgcggagggctggttaggtaaattatactttttattacgtgaaaggattatagtaataaacaggcagttaagtggtggcagggagagtggagtgtagatttgacgaaatgaatattctgcttagctgaggttcgaagtaaagattgtttgtagttactcgttaggcacaagatcacaattctctgaaataaataaactaaattgtgaggccagaccggttggctaaacttgaaatacgattagttgcatagaaatcaatcaactaggttgagtacccgggtcactgatgagcggctggcttagtgacttgaattcaagtcgtccatagtatcagggttacgtgataaaagaaaatatcaatgactcttgaaatcatcgacataatatctcggttgttagaaattttttctcatatgccatgcaaaatctggtagatcactttcttgaattgcaggcttaaacgcgacgacattttctttttgagacgattgaatacttgaccgcaggaatcgcgttcggtatatatattaccctgcctcttttcggaaaacgattaacccataattgaagagagcaaaccaaaatccattgcagatcgttgcccggcagatgtttagttcgacctgaatccacatttcctggcaagatttctcatgcataaggcgaggaggaaatcaataaccagcgccgatatgctggagagaaggtgtattaaacgagtctacagcataagccacaagagaaggatgaattactgagtctgaaacatatgtttagcggcatatgatagccgtcatcgtaacggacaatcaaatcaactactggaacgaccaatgtgacggcactgatttcccaaaaaacttgacttcgtgcagtgaaatttatattcgacagttagcaatggtgttgtgggattcgcaaggatgacatgatgggcatggggtgctcgagggttgtggagagagtcagttgggcggcaaacatcggtaccgatacatccgaaatagctgggaagaatgtgttttgtcaacctgaggattcggtgtatttactagcaatcgggtttctcttcaccgacaacgtacatcggaaattggctagtgttcggatttgaccaccatattacaccaaggcaggatctaaagctttcatggcagtaacagaatttttggaaagtttaaaacaggcgtggtgttcaacgggcccgaaaggggccgtatgaaatgccaagcacgtaatcagatcgtgcgatacttaaactcaaagaagcagaccaccaatgtataattatctgaggagaaagcacaatcgattgtaatatatttatcatattcttcggcccgttcattaaaattatacacaatcttcagatattgagttgcttctcttaatgaagtcctatggtagtagaactctagcggtaagagatgccgtaacccgcaatgtcaccaaagtggccaatggtgggtacacaatcacttgtctcgctttcgccgagcagctcctcgtgtaagggatccaattcagcccacgcgttggcatatttcatccccttgagcctttccttctcgatgacttgaccgatctcaatggccccattctcatttatattgttcatggtagcttcaacgcttctcggtcgaaggccctgatgttgggcgggaaggtatcccatctttctactttcgccaagtagacccgaagctctcagaagtcgttccggcgcgacggtcaatcttccctttttgaatacatatttggagaccgaagttgcaaaaataacgggtcgcgctggcttgtccctgctattctcactttcagccctggcgcaccctccagaaatgcttccggtagacaacgtatgagtgacaagatcaatttgtttgacgcttcctttctggacaaagtgtgtcacaatatagagccacttttggtcccatgtaaggatccgagaccatacttcgtactgctggaagattcgtatttccatcttgaagcttgtggtaacagatccgattatggcagccattatcccccgcctgccaccagcgacgagctcttggtcgacaagagaaactccacgacagcaaaggtatgacagaagatgagagcggcttgcatcaagatccgtaaaatatgtactattcgacttgtggaggttgtagtcggcttcaagaagtggtgtgtatgttgtcgttacacagggaagaaagactagcggcaagtttttgtctttgcaacgaattgatacgtgatggcttctcttctttgttaagaagttctggatgatggggcgaaagatgcgatactttaggaaggtcagttcagtcagaatttgtaggggcctggagagggaagactaaagattatgagcttgtcattagcctttcagtgaacacttacgtgaaatactagtggtaaagttttaagattgaccacaaggaagattgccaggaggaacttccaaagaccgaaggactgaatcgaactccaaagccattcaatcatcttggcgaatgtcatcagttctaaacgcatcgagcgaatttgtgatatttgagcagatctgagcagaaattggctttaagaggcaatgcaacgcagtcactgtgaatgtgttgtatgtgcactgtgctattgagaatcgattggaaagaagagaaaaagaaaaactccctcgtggaggtgacttatgattttatgatcgcataaaacgaatcatatatcgaatatgcgggttcatacggccgggaagccgaggcaaactcggcagtgatattgtcatcagttaattcttactgctaggattaagattaaggaattttgcccaattctcgaacgcattctcattggggcttgttagtaatacccgccacccagaaattggaacaccataattcttgaatacccatgtctttttggatatactgaaggatctgcggcagggcttgcaggctggtattgacaagatgcgtttcttctctttggacctgttcatgggtcgcatactggtttaaatcttggcgcagttccctttccactgttgcagaagcatgaggttgcggataggatactgacagaaatcaggtgtatggcgaacgtattggtaaattcacgatggtaaaattctctaactaactaaaaacaacaatggtccgtttttgacagtctggtcggacacaattagtaagcaatttgcatagtctaaaatcacatgattccatggtattggactcggtaatccatgtactcggtctgttttctgacagatactactgataacgcgtctaataattcaccgctggtagagagcctcaagggatctattcaggggcttgagctatcaagcaatatacctattttctggctccaactatttcagtatattaagctctacttttgtccgtcatcctttgcgacatagagtcgatgagcctgtcgacgtccatggtcttcagcgcttctgctaatgggaagcgggcgtatgatccgacattgttcctacggttctgggctcttgacagagcactccaaatgggatggtcgcgaggtagagtgtgcagtctcgcaatcgtgcgctgcgctcggtggcgaaggcgaaggtgcgtggggagtatataggcttcaacctctagggtcgcggttgctaccgtcctgaacgccgacaggattctgatcagcacgtttctctgaactgtgttcaagtgtcggatgtgaactttgtctctaagcgggtcatgctagaccgtcgatgcgtagtcaactataggcgcgacacatgcttggtagagctgtcgcatctgctctgggcgcaagtgtcgtagtccacttaaggcgattgtggtcttggtggcgcgcttgatagcctgctggacatgttccttccagcgaagtccctggtcgaacaccacccctagtgatttggctgtaggcgatggcttgacctcggtcccatcgaagatgattcgtccttccatatgctctcccctctttctggtgaggtggataagctcggttttctccgccgcgaagcaggatccagttctccgtgcccacttttcgatacgagggacatcctcggactgtatcttggttaaattttcttgaaccgagccccccactctccatcggaagtagtcgtcaatgaatgccgatgcacctccctgggagtcgacgggctggtcgaccaggtcggcgttaaagaatgcaaacaagatgggggaaagtggtgatccttgagctagcccagcattcaacagcagagcagtctcggtgcggaagtcgtcaaacccaatgctggcgtgccggtcgctcatgaagcttgcaatccattttctggccacaattgggatccgtcttgcctgcagcgacgcatccaggcttgtcttatttactccgttgaaggcgcctttaaggtcgaaggcaattagggtcaccaccttgtgcttgtaccaggctttgtcaatcgcactggacagcactagcagggcttgctcggtggtcctacccggccgtccgccgaactggctgtttggtagcaggccgtgtttttccgccagataggacaaccgtcgggccaacactgcctctaggagcttgccaagcgtgttaaggagtgagattgggcggtaggcaccaggttttgagtaatcaggcttgcctggttttcgtaggacgattatttttgcactcctccactgtctcggatggtgccctagctctacactcgctgtgaagatgctaacaataaaggccttgagatgcctccaaagcttcttccaaaccagcatcggtaaggtatcttccccgggcgctgtattccctttggctgctttcagtgatcgctcaatctctgattctgtgattgggtgccacgggagttccgtcgccggtgtggtaggtgggttgaactcgggtggactcatggcggggaagaacgcatccaggaatgccttcgctttctcttcgttttggatgcactcctccgagcccactcgcagtgctgggacgcaatcccatgtctctcggggcttcatgtacgtcgcagccttccagagcttcccttcaccagcttcgtcctggaattgcttccagtgtgaggacttggctttttcgatggtcctcgtccacgctcgtcgtttctgctgcatagcttcgaaggcagtcgtggtgttagcgtgctctcttcccagctcggcgcagtttgcctgccacctcctacgcagttggttgacttcgacttgttgggtcttaagatctggcgtgaaccatcgcttggagtatggcgtcgggcgtgtgtcgggtgtgaaccggtcgaccgcctgggccgtcaccgctgtaaggttttccactacccggtcgagtgttggccgggtcttgatctgcttccatgggttcatctgtcggactacttcctcgccgatcctagtccagtccgcgcgctcatacgccttccttgctttggtgtttggcctgctccggagttgaaggttccattctggataggtggcacggtggtcggatccatagttttcgtgatacagatagcatttgatgagcaagtccgggttatctgtcaccgtctggtcaatggtcgagttctgtctagagttgttgaatgcccagtaagtcgccgtccctcgagggagacaactgtggaggttgtgggcttggaagaaatcgatcaggtcgctggcgtcttcaatgaatctaggagcgatatagttgttgccccacattggatggtgtcggttgaaatcaccagaaacaataatactcgtcgcgcgctgctcattttgtgtggcgcttgtgatagagttttgtatcgccgtgagggctggtaatgctgacgagtcgttgcccttgaaaagtggtactggaggtatgtagaccgaaattaccagcgttgggagtcggctgtccagatcttaacggccgcgacatctgggtggtcgtatggtagttggcgatgtgatgaggtagaaattcttcgattgacatagagtaagctgcgaaatcgaacggcgtcagtctgggttgtaggtcgggataaatgccaggcgctgtggttgatatgcgttcggtaggtggtaatagatggttcctggatcagcagaacgtccaactctcggctctggggatcgttgatcagcgcctccatcctcggtcccgatttcatcatgttcaactgtaggatgcggaggtacttctctagcatctggtagggttggaggtcgatggtattgggcactctcgatcgcccgtagggtgttcaccactgcaatccagacaccgggctctcactccaggcgggcatcgctcccgctcgtgttgtcctgcacagtgtccgcatcgtggtgtttccttgtatgaccacgctagatgaccgaaacgttggcaccggaagcacctctttttcttgatctcgcggcgttccacgctaccgatatatctttgtccaacaaggagaccattgttgaggatgtattccgctccttctgcagagtcaaaccagataccaagcgacgcgaacttccccagaactttatctttccgcttaagccatgctaactcttcgatttggaagccttgttcggctaggtcgttttcttccataattgtttgaatggcttgagagttcgcattctctaggtcgaagttttcagtcggagtgcggtgcactacgacgccgaatcgcggtttgaccagctttgtattttttcctagctcattcagccattcagtgttgttgcgggctgcttcggccgaccctgggtccttgaagcgaactaaatatcccgttttagtggtgccaatgccggcaacttgtgcatcttgagttggaggtgcgcttaacagcgctgaacggatataggggttagccgagtcggtagagaggtatcgcccgaaactgttcccttctctactctcattatctctcggatctaccgataatctctgtgtgctaatgcggacgcagttccggtccttttcgggtcgttggaggcttggttgcgggtcactggtaccgctggctgctatcgctgcccaagttctgggcgggtttggttgtgggctggtttcgatttgtgctcttagagccctgacttcttcatggagcctgtcgttctgctctcggaggacgttctggtcgtgcttgacctcttctaggtcggctttggtggattcgatgagcgtggtttggcgatggatgatatccttgaggttatcgatgagcttccacacctctctggtggtaatccggcctgtgccctcggcgggtgtataggcttcgccatttctcgttcttttccctatgatttggcctgcgtcgatcgatactcgaggttggaagtcttcaactgagaagctggcctgggtttcttgggtgtttgtgggagggggctcgggccctcccgctggtgggtccgccatcgttccggggttagctcccgctcggtacacaaccacaacagttttatatcggaaatgcgtccttatatacaggatcactcctattgttgctctatgcccccgatcgataccgtacggttacaggatcgactttctacaggatggatcgaaatcagtttcaccactttgctctcatagaatctttctcgaaccctatgacgaaacacgctaattcatttccgatttagcgtagtttcaaatattgaatcgtattgaaaggcgttatcacgtgttatattgttgactcatttgttcgtaagagtattacgaacaaatgagtcaacaatataacacgtgacctgttgctgtcttcgggtctgccatccacatgaaaaggaaaaggatcacccatatgcaattgtaccttttactaggtggaccatacaaaaggttcatatataaatgctgatttttcagtactacaaaagtctctaaaaacttattataacctatcatatataacaatctactctatttaaatactatattcaagttccagcctaggttttagggagcccactacgagcccacttaaagtattacactttgaaattttgacctactatcgcgcttaacataagatattcgactactaaggcgtccgggaaacttacccttacaatttagtaatagaatattagtgctgcacttacaataaaatgatattatataattaagtcgaaaaaaaacgagtatttatatatgtaccttttgtgtggtccgcctagtaaaaggtacagttgcatatgtatgggtggtccttttcccttttttcatatggatggcagaccctccgtgaggaaggtctgtaatttctgtaaaaaaaaatgtaagggccggttagtaccgagagcggttaaggctgagagattagggttgagtaaatcttcgagctaccaaaaccaggttgcaatgtaagattgaatgacttaaaatacattaaaggtaattccataatgcataaatacagtagatggaataatccaaatcaaatatctacatatgtacatccctaacggcctcggaggttcggccgatatcgcctccttcctcttttgggccttggctttttggtcattttctttgtgaggctccaacccataatggccgaacgctcaacccataagcaaggcaagacacttcagaattacgaataaaatgggcggggtaagcggatactggccaatagcgtaccctatatccgccacatagacagttgccaagttgaaactgagctaagaatgggatcgcatgggaacgggcgctcagggcgctcggggcgttcgtttaaggggctatgctcagccccgcccgggaaataaaaaagtaaagtgtttttgctatgaaatattccacatatcttttcttttgtttcccatttttcttccctggaatctcaagatggagacggcggatggtgaggtccctctacggcaacttccgagaagctcaaacaatcttcacgcacctgaatactccagacacgattcctcagccgagtctgacccgcgacatgatgaggagcttccatcatatacccaggtgcggtcaacaggacaaattctaggacgagggcacagtactttgcttcatcgatcggcttgggtatttgcattcacgatcatttacgtcgtactcgtcgtctacgcctgggccatgactgctgtactgtcaacccgacccttcaaagacaaatcctgggcgtactcgtttggaacctcccgctccagttattactatcgttataatgaagcagacttcgatcaagagagaaatatctatcgttctgtgcggactatccataccttcattcaacttgtcactcttccctggatttccacagtctgtgctagtgccgctgtaatctatgcgcagaaccaaaaggatcctatgggccttcggctacgccaagtcacaacgctggctgaccgcaggtggatggacttttctttctatccagccctgatttataaatggaggcaatacggtagcaagctactggccactgcgatcttcatctgtgtgtttggtctcatcacatttcccatccagtcggtctttctcagttcacagtctgtcaaagtccggactttgccccaggagattgccactatctatgacttcagcccgaatagtggttattcatcttcatcatacgataccggcaaagacgtgctgaaagtccgcaatgccctcaacaaagcgaatgtcgatttctaccaacctaacttgtggagtaacaacagtggagtacaattcttgactctcaacgatctgtcttctcagacgtactactcccaggttccgagtggtttcaacacaggattacttcgtcagtttgctccacgtgtgaactccacagctacatatgagatcgtaagagcgtctgatttcccggtcgactgcagttcacgcccaggggcattttatgccgagtattcatcttcatacccgcagtacgttaattctacttcaagttattcttggggtgtcactgcatgcatgccaggaaatatgacgagatctccttggcagctggcacgtaaggcacgtaaccggcaggatttctctgaggttctctatctcaacatgacacaagaagattacagaacaagagatcatcaaactctttttcagatcactgtcaacaccacggctggcttctttgaattacccaactatatgaacaagggtgtacccggccccttactggatcaagatccagcggaactttgtgatcagcactgtccatcccaattcaacacatactattcggggtaccgccgtgacgggatcacagtggaaggcgctctcaaagccggatcgcttggtcccatctcaacagacaacaaaggaccgttgttatcggccgcgctggcaagcttcggccctggctctttcatcgactcattcattgcaaccgccgcaaccgttaaagcagacgacaaagttacagacgaggtgtcatcaagcctgggaaaagtatgcgctgcgaacaccccactcaccaacctcatggggtcttcctctctggagtgcgtatctgttgtgatcgatagttatggcgactattattaccctgttgggtcatacattgcgcaatggataaattacttccaagacaacgcggagccagttcagaaggccttcacatcagcggctttccttgccaatcaggaattcctttccagtcagaggggcagattttctgttgcccaagatttgggcgccgatatggatcttccatcaatttctcccgtgggaattatcgtagtctccatcttgatggcactttacttgctacctctgttggcgttgtcactctacgcgggtttttcctatcgatggaccgaaagattggattcctttgtgatgctgcgatttggagcctttgttggtgataagttctttcctttgctcattggtcgcgagagtgataaagttcctgagctggacgagatgcctggtgttattcgggatgtggcaacatactcaggcgacgaggttattaagattgggaggttggggttcggcgaaggcagcaggttgcgagaaggccatcggtacgagtgcttccaaggaaacgacgagccattgaatcattacgaatctcgacggatgcaacgggttattcaccgccgagcctaacaattgatatacgtatatgtactgggctagaaggaaccctcggtcatttctaatgatttgatttgatctaataataatgttcatatacgcaaataatctcgatgcttccaaggctatttcatgactcattagaccttatagtaggtacttatataactagtagccccttcacccttcaccgggatttcccccataaagcgcctgatttttcaaaatactaggatttattttatgaccagcctggcagcttggacaaactttattctggaaatgttcctcgttatgggtatagtattcgcatctttatcacgaattatgagatttatattgttccccgaggtctggatattattaaaatacaggaaggaattgggaaggagtcatcggaatctatcatatagttggtcctgggtaaccgagctgctgagggaggttcgagtaaatatgtacagtgtaagagtgtacggagtatcctgtgacactgtggctttttcatagacaaatttggaataattggtaatgtagttgacagtaacatatgttttaattctcaggaccctcacgcatctaatgtatctgttgatgtgggaatttgtcactgcatacctagctataggcgcgatcgaggttcagggatctaccaattccataaagactacgtaataaagaggactagataatatttgctagacatgggtaaagacagtgagatgtgtaaagaaaaacagacatggcaagagtcaggtcttctttgttttcctcggctctccaagttccacgctttctcaccctatgtataccatcacgccgcaatctattttgggcactcacttcagtggatacaggggttcgagacaaatggagttagctgatgtctttcgtggcttcaacgtgacccaagtgaagactctgaacctttggagttgaatccataagtctttgtttgacaaagccagcattaaagcccatttccatccggtacagcggaggagggttgtttgcccagacagagccccaacaagcatcacaagtcgtgtcaaagatcaaaggaataagccaaaagcgtattgaaggaatcctcgaagtcagatccactgagagtacgcctttgcaagaactcgccgaatgaggcgtttcaagagctatgttgaatgaacagcatgaaaaggagattagaccttcatccaagagaatgctctgtcatctttgtttcatcttgtctacggccttcaagctttcttcgacctcccataatcgaggcttccgtccggtgagatgggttcggcgtatacaaaatgctaaggatacaaataccttcgaggttctctcctttatatttatcattcatacattctcaatatttgatttgctagttacctagagaaagaaccaccttgctcgtgactatcttctctgttgcaagatgcctccacggccttttttccctcgcgccgcaaaacctggcagtaaagatgcatccaagaagaccgatggaaaacgcaaggcagatagcttgacgacccgggattttaacctggtccgcgatgtcccggaaactttgttcaaatcgggcttcattactcgcatggacccagaaaacccatgttgtcggcgatttggatcggacttggtaggagtattcgatcgcaagttgcgattttcttcgagttgtcagcaatagaccacgtaagaaccgcaatacccttacccaacaccgccgaggccaatcagcgctatcctcgaccccgcgaccgagttcttaccgtagatctgatcaagcagtgtctcgcgacggacaaaatctggaccacgcgtgaatggcacagttgacaaagggctgggcggagtttctggcggctctagagggaagcggcaattagtcagtcggtcttgaccttgtttggttccgttcctgacttacccggtggcaggtgaaaaagtgccgtaaatgtgccataattgattcccacctgggctccatggttgacaccagagtgacttgtcgacgccatggccgtataaatttgcctgtctgtagttcattacaagctcttctctggctctcaactgcaggaggggtacgtcatcaggtgactcggctccgcggcgctaagacaggagaccagatttgcaggccacccacgtcgaaccgtggggcaggactagcaccttcccaggaaccggatcgacccgagccagaacactacagctcaagcgcagcacgcgataatcagaccggtacatacccgcggggtgaaaagcatgctttgacagtatgacgtcgagagcttattgctgccggctttatcaagtacacgatggatactttgagatcgcattttgttgttgctatggtgaaactaacgtatggttttccagccaagcaaccacttttttgaggtccgcagcttgagatgggcccccgagctcccaggaactgcgagatcgcccatgtcacgtgcgtttcccaagagccagcatcccccagacttttcacccaaattcattttacccgctcactgagcagaggtggtgcaagggtgagcagatggagttccctatcccccctccggcggtcgaccactgagtctgccaaagctctcctatatcaacgtccagacttttcttcgcaatatggcgccaagactccctctctcaaagctcgaaatgacccagcacatgatattgagcaaatcattgagtgcctcgcaaatgactaaagctgctgaatatagtaagcgttccatcatcaacatcagcaacaacctccgccagtttggaaatgtcggagcacccgcaactcgagtcggtcgacgacgaagcataactcctccgatgatagaagcactgtgtgatcgcctcctcgaaaagcccgggctatatgtggacgagaggacaatctttttatgggacgagttccgtgtccaggtcacaaattcgagcctcaaacgggctctcgcttcggtgggctggtcgaagaatgtgactcgacagagagcaaaggaacaaaatgcggatctacgagacttttatatacacaacctgtcggactttcagtcgcatcacttggtctatttggatgagtctggatgcgataaacggattgggttcagacggacaggttggtctcctttaggtacggcaccattacaggtagccaacttccatcgggaccagtggtaccagatattgcgtgcatattgccaagatggaatagtgctctctcgtatatttcagggctccacggattccgcagtcttcgaggacttcattggtcagcttcttaggcattgcggaagatggcctgagccaaagtccgtcctagtcatagacaatgcatctttccatcattctgatcgtatcgaggaactgtgtactaaagcaggagtaaagctagtatatcttgatggcggcaacgagaacagggacagagaaagactgtattcgctatctgacagatgactgggggaggaagaaggaagagaggaagacagacagagagagagctggagacaaacaaacagacaggcatgactagcctgaacaaacaggcagccagccaggtcacatgacccaggctccaacactatagctcctgtcagggatatacatgaagtatataggacggatggagttatgggctatgcgagacccacatggcgtatgtgggttcccctgaacgcgaggaagctaccttttttgcttcctcacgctacgtcttgtatctagagtcgactatatctttctttaattagtcattactcatctgaacaccttgtcttacacatggatggatctaatataaacaatctaaaaggcaaggttatatgaaccaaccagcagagaacccaattaaatatgcactagtaataaaggaaatcaaccatatatctgcctgcagagcacatgtccagcgcaactacctaatgctcatatattacttggctaccgaacattttgcatcacatgctctaacaggcccttgtaacaaaaaaaaaagatattatacaggggctagttaactactactcactgggatcgctagtttgccttgctagttaggcgcaataatgtaacttttttccaatcgcttgacatgtgtagacatcccttggaactgcatagactcaccacacacccaaattcgatgggcctctataatctatatcatttgctacagctacatgttatatgaggaatgctagacctcgctgtatatcagtgcgtaattttcggatgagttgcacatcgtatattagttatatcagggtaacttaacaagatgatgtagcaagaacatcatgcgtgaatgaacattcgccattgtggaaccatcgaatatagaaagcatcagagcaaagctgcgactgctgcagcaaccacgggagcagctgtgatcaatgaaccggcaggtccagcggctgcagctccaggtgtttcggtcgccgcgggggccgtaaacgacttcactcccccagtgacgtccatcttgtagtagctgctggctgccgtcgaagaagtcgccgaagatgaggacgaagaggcggtactacctcctcttacggttccacccatgctagcgctcatggtgcagctggcagattcggaccaggatttgaaagagcagtcatacgtttcggtaacggtaacatcgtaaccgtctgtgcctggattggtggcgacgtattgtgcagcgaagttcacggtctcgggaccttgggtaatcgtccacgaagtgacaatgtcgcagtctgatttggcgacgtcatccatacaaccgacatggtatgtggtggcttcggcattgataccagcaacgctggcagcatagctagtcacgccggggaggtcattgtcccacgtgggggagaagattccaatggtggtgcgggtgctagattccttggctcgagcacccagtgatgcgaggaacgcagcggcaaagatagaggtacgcatactgatagggtttttcaaatatttagggtgaagtttagcagagaggcgagtcgactaaaagttctaacatccggggcaaaccgttcgctttaaataaagacaaaccaagctactgtgaaacttcgcttatcgagcaattttggacgactgagctatgttagcgtagacctagagggtactagtgaagtgtgctagtctgggctattttcatcattcacccattggaccctgaaacgttggactggacgagaataggactggcgttcgactaccttgctagcgttacaaccgagtagcaaagcacttcaattttgggggacggaccccgctgaataatacatcacgggggccctgttacgatgtataattaccgtgtagaattccgaaaggattagataaatgcgaatacaaatacaggaacaattttattcgcgcgaattgttgagatgaaatgattgtattgggtggagttgactcattttctaggtgggactcattcattacatatctcttggtagtagtccccgccataagctctagcgggtctgaattagtcatcgcacagtgaaagaagatcatttggatccgattgtgggccaatgaaggtcgggtattgggtctaaaaaggcttacgtagtctgagtgctcactgggcactccgggcacagaaggaaattattttgcctttgtggtaagggagagtggcagcggggatgtccgtaagattaagccaaggaacggtggagcgctagtgggcaaatatgggtgtcgtgggttttcgtgtgagacataacgcgggtatccccgattttcaccttttccaatctttttgttaattcttttcttattttcccttgcttttccacaaatctttggactcgattttgcctcgggtgacctttggccttggaaactgtgccaaggataagccctggcccctgaaaagtcacctgtttatataatttgaagtgctcttcttttctatctccgttttcatttccatttccccatcttgaatattctaaatactcaaatatgtacacattcaataataggctgtacctggggtcccttttggccttgcaggcctgcaccaaggtcataggcgcctcagctacatcgggtgtcctcgaagtcgacttggtcttcccacgcaatgagacatatgcgccctctgcacaaatgcccgttgtgtttgcaattcagaacccgcatctggttgcgccgcttaacatgaaggtttcttacatcataacgcctccccgcaattacagtaacatcagcgagccagccctattcaatatgaactcgaccagtctcttcagcagcgatccttacttcctctataacaacactgactttgtcaacctcgagggcacgtgggaactcacatggttcgtggaatacggacgttgcaccgggtccagcggggatattatgttttaccccagcaattccacgattgatagtatcatcttcaccaccaagagtggtgccgcgaagccggacctcattgctgctggcaagaaagatacttgcgctacaggtattgcagcctggaatgttaccggggcaatggatgtggaaggcgccgattggggcggctatgacacctgcgcggtcgtttcgaagagatcaccatgggctactgtggacccttgcgcagccaagttcgactctgctattgcttcgaatatctcggctgccttgaatgccactgcgggtgacaaagtctctgcagatgagaaaaattctaaagatgagaatgattctaaagagaaagatcctgcagctgataatgcgggcgctgtgcatctgccggggggtggtgtgacattgttgacagcaattttcgctgggctcacttacatctttgcataatcgtctcttttcattgattcgacattcaattctctgatcacacatgtatatattgtatttggttagagatcttggccaaaggaggcatttgtatcacagtttgaataaataaattctattcgcagtcacaggcaactacagcgtaagaacaaaaaagtaaataaatgagcgcattgtcgtttccatggcttggggcgcagctagttgggcattacgagatattcacttgcacgcgagacatagagccgcaaaacacagggaccccggaaggttgtttagtgaagaccaagcactcaaggtccggggctggtaggcctcggcttcgcggcgcgaccattcacggtggcgctcgaacgcctggacctccacttcgaggcgcgcttcaatggtccgctgcctcaccgtcccgttgaggtggggctccaccaaggggtggatatccgccgtaatgggtttggcgtacttgaatagacaatcgggacgctgaaggtcgcccgacactacatcccagacctgccttgctttgagataggaggtcatgagacgtttccaggttgcgaagttgtcgcttcctgtcagaggctcgatggccgtgactgctcggtcaggcgagtcatggaccagagcagacatagtgaggatagagaaagcggggtagatatataatcaagatcaagattgacaagatgattctcagatgagtagagacggcacccgagattttgctcccgggctcataacctgttgttgttcagaggtatgaattgattgtttattctagagggagagatgaggttatatatacaacacggagccaagttgattgtaaatcaacttggttgtctgtatagacatttcggagctaattccgatggtgcggcttgcttcctgatctgcaccagcctcatatcacaacagaaaccttgggtcaaaggcaacttcgataattctaaactggaagataaatgctcaaaatggaggaagaaatttccgtacaatcacagggtgtcttgagggctctttcacggttcgtgaatgtattccactgtcatctaggaagtgttacagcgtcactaggcttatagattgctaggtgtcaaaaatctggcgaattcaaagatccgacccttgtctgcgagggagaaaggatcaacgtatataaagttgtggtttgctctcaatcgggcgtacttcatgttgcctgtactggcaactccaaggttagtaatttactatagcactaccaatgaggagctaagattcgtctaggaggcgtcatccggcgtctatgagtttttggacgactcaaaaattattgttgggaagccagtaagcttcttttacatcccaaaatgcataaaatatcccaggtcacgggctcccaattgtttgacctgtttgtcaaaccgcgggtgacccgcgcttaaccacatgcggtttctggcagcggcataaccaaccgcagttaggagaatccctaccctcaaccgcggttgctgccgagctctaacgacaagagcaaaggacggggagctgtcacgcaaaaggaaaaagacagctttgcgcctgaaggctgtagtgccagattcgacctaacttctcctgattccccagcgactatcgactcttctgcttgtcacagggactaattaccattaaaaaattgttggccgcggcgcatcttgcttgactcaatttcagattccaaaattacaacgagtaaggaaattaggtttccggagcatctaccgccgggcaatctccgttacgacgcactcaatcacagattacatagagcagagaaatatactccgcccatagggatctacggttgaatgattttgataatgcaacgcactattcgctacctgatgccgttccagcataatgcggcacctgacaggccgtgacagatcagttgttttcagccgaggaagtaccgccgctggcttggggttccgggctttcaatggctattccccttatcctcagatggcctcttagttttaccccgaagactgggggctcccaagcacgcatgcaaactgaagttgagaagatgtttttgccgctgtgcttagtgatatagatatgaagaataagagtttttattatttgtcaggaatgtctgccttaactcgtacagttctgccggtcatttattaactatataccttcggtaacaaattctgcccagagtagactatattgtcttcatactgcttttttcccacgtcgtgaggcacacctacaggccttgctcaatcaacccatcttcataaagttgcagtatcatacgtattgcctcctaatactcatgtgaagataattgaagtgttcaggtgatgacgacaacagtcggctttggtcagattattgacgaattggatactaatgtaaatacagtgaaaagggaataaagagtgctgcgaaacttgactcgttggaagccaacctggtgctagtaatcggaaatttgtgtcgctcgatgcgaaattccagcttgctcgctgcatcagagcgatgagttgccagtgggttttccagcctgagggatgaaatgactgctgccagctacgttctcacggcgatggttatccggatctgattcaaccctctggtcaggcttatccgctgcacggttgcggattcctgtaggctttccagcctgaggcatgaaaggggtgctggcagcgacattctcgcgatgactgttatcctgatctgaactcactctggggtccagcatgttggcaattccattattgtgaagaccacctttgccataattgtgtgcatatcctagatgagcatctgggacgttctggcttcctgataatttagttagatctgataagtgtatacaataactgaaagaagcaaagaggtgaactgtaccgctgttgactcgagggtcgagtttattagcaagcttggagcggtaaggtccgccgttgctcgactgatccgacataatgaagtgtggtgtcccgcagtggttatcagcactggattaagtaactttgctcctcccctgagcggcattatatttgtcttcattggccgattacgtaggggtgacatcagcaaactcacagaaaaaccatcgggtcgccagcttagtcatgcaaaactaaatccaccaaattcgtagattattggcccctatcgggttttgctagctcaggaataatttttccattgtatttctactgttggaccatacttcagactgattcggccatagccccaggaaccgcacttgaggttccaggagttgatgaagctccaccaataaggttgagtgacgtcattgctctggctcggtccccaagaacgagttaagcacctcttctttctgttgcccacacttattgcccgtatttcaatttgtattcgtaatattgattacacattccagagcccacattttaggtcgtgagacccctcacgttcctgggatcatatccgaccccaggaccatggcatggctcccaggtacgtggaagctttattagagttcctcaaaagctttatggtccggggatggatgtgacggtctcacgtatacatagaggtggatagtgtttcaagatgaataatcaatgttaagaacaactatagttgactctagatacaagacgtagcgcgaggaagcaaaagaaaggtagcttcctcgcgttcagggccatatacaccatgtgggtcccgcgtagatcatatctctatccgttccgtatgcttcatgtatatccctgacagcaatcaatagcgtgcctgggagcatgaaatctgggatcagttattatctggcgctgatttagacctccctgaattttagatcaagtgcccaatagcggagcagagtggggccgagatgaccaaagtcgtcatagtagatatattccaggaaacctgctgctctcagaccgcgtctgcggatttgtggtaagtacctgatcgtcagattgggtggctgagctgagatctgcggggttcatgaatgtaacttgacgtttactgtttgcattctaaccacgctatcacactacctgaaatttcgtggtaatggcactgcacctcggcacaccacatgatatctgcagtccaagggtcatgaaattcaattttcatagcaaaatcgccattattgctatatagcgagtattggccgtcggtgtagccaaggtagctgacgaaataatgtcaggtccatttgacctttcttagaagttgaaatctcaaggcctcaccactgtctattgatgcgggcaacccaaatatattaactggttatactatgaacataatgtaactatctaatcaataaaatatttgcacaataaaaagatgctcggcatctactaagtgttgtgaggccccagatcctactcctgtagggtggttccaaggtttagatctctctgtgtgtgggtgtgtctccagactgtctccacattggtcaacccgtgggtagttttgatgagtctcaatactaaaattatttatgcatctcgtcacaggctcgattcatactatgtccatgtgctgtcggttgatccatcacgttgattaaatatatcactgagacctcaggacttcaggtctaattttataagctgtacaatcacatcgccctcctctgctagactaaatcatacataggcttcaatccaagggggccattcagtttgttctgactctccgccaaccaagttgccccgtggtgaaagcacactgcgagattgagccatgagtctcatttggtacaatcgccacatgtcccaaagaggtataccaagtcgtcgaaatgctttgaaatccactttccagagagcgtgataactacggcctttttcaccgccacgaagggcattgaaagaaccaagcacggcatttctgcccttcgcaaatctcggactccgacgccatgtcgaatcaacttgtgtattttgaatatttggcagaggccagcatgtctgtaccgccaaatcggttggtggcggaatggtaactaaatatgaagcccgatagctgagaattgttggtttggaggaacatagatcgacgacgcactccgaaattgtctggagctcttctattccccccggattccgacaccactctatatattgttcaatgaagccgtccagatcacaggtataccatagccaatggtttattgcagcattatagatctgatggaagagctcaagtttccagagacctcgatgcgtccgataagtctcgatccatgatggtagatcaatatcgaattggataagctcgccaccttttggtggtggaagtattctattcacccaatctataacattggcatcggaagccataggacggcggggctctgcggactcgagacgactaatgaaacgctgaagacaagcacaggcagtgagatgtattttcgctgctgtatttacagtccgatggaccgcgcctagtgagtgggtggtggaaagggaaataggtcgtataacatccgctggtgagctagcgagctcttctagcagggcttgcggagtgaatgatgtcgatagaatagaggctaggagcgtgaaatagtaatgaagtccgtgcgaggtgagggagcaatttctcaggacgttttcggtgatgtttttgaaccagccgttgaaagcttccttcactctgggagatataggcgcttactcgatatcaagagtaagattgaagttataaagggtacttttgagtggcgctgtatagatgacaaagattacgtatcccttctccatgaggacacatcccaacccccttccatttctccccgctccccaccactgcccacctctgcaagtcatttaatctatttaggtttattatgtatttgtgttatttcaaaatccaagcattctggttttttctcttcccccctatcttcctacccactaccatccagagggtgcatctcatccatctttgctaaccttcctgcgtaatatcaagatggggtggagcaaggatcattgccctcggcatgtagcacttctagctgactctctccttcatttcttcttgctccttctcttgtctttttttacaaaaccctcatacgtgcataatttaactgatagaatgctcagatggcttgcaaacacgctatttaccaaacagtagcccatatgcgtatccctcataatgaacacgaccggaatagaccgcccggccttcaatccctccagccaccgagcccagtgctcgtgcatacacaatctcgtggtgcacaattgcctgctttgtcaaattaatcgcgaagacttgcccacccccaagaataaaccgggccgtcagcccaggggattccatgatcccaccagtgggcggataggttgcattagatctcactcggcgcaccttcacggcaaaatgcagcaagaccaactcttaattgactccagccacctctccaaggcggacctttgtcacacccacctgtccgatccattcctcagtgggcagctgtacaaccgaggtgtctggatatatgaactggccgtagacacgtcccatggacgtggagttcaagtaccattttacagagaaaggcgtgcctcgacccagaacgaagaggagcagagagatcacagtcgccagcaaggtcaacaacaatacaatgaaagcggggatgccataagcccaccggtagtggatcctgcgattgaactttcgaacaaatgttccgcccgcgttctcgtcatcagcgctgtttgcactggctgcttgagtatgccagcctctggtgccggtgacagcgttggctgcaacattcgtccagacaaggttcaggattttcgcactgccctcggcatccttggacaggtcctgccaacgagagaaaatgcccaaatcttcatcacctgaataggtaacagcaagactactggcctggatcccgtacgacatactcatggcatgcacgtggaagtcaactccgggaagattctgcaaattcgaataagggctcgcatcatgcctttggtaccccggtagatgcagccactcccgctggaaagaaacgaggtctggtcgattccgatccgaaggttggataaagccccaaattgggttcgcctcctgttcaggtagacctgtgatttccacgctccaccatggtttgctctcgtagtctttagcttcgatttgtgcaactgagaggccggcgagctggcctgttccattatatgtgaagtcgacagtcttgacaattgcccttgttgcggatgcacaggtgtaaatgggcatcataagcctatcgcctggaaggaagaggattgcttctgttccatcacgtttgctaggggctccaaacaacattccacaactgatggcgacactgcttctgttcgccactactcttccattcgttcctttgcactgggtcactgttcagcttagttagtactcgtctcatattcttccagtgatgctaagatacgcacgggctagatcaaagtcattctggctgatattgaacgggttggtgtagttcgacactagggagcctgtggtgttgactaatgatggcacggtgccattgaagagtcttctaggtaacgagccaaaatacctgccgaactcgggccatgtatgtatcctgtctcgctgtccatattgattcgtaaactcctcatggagaggaaagtttttccctatctccgagtcaagataatttgtagtgttaggaaggggattcgtcacattcaagaatgccatcgtgtaaacgttgttggcccatgctgctcgatatgctcgactgtgcaggtcgatggcatttgccggagagatatcattatcgaccatgggttcaccggtatgtagattcacaaaaccaccccggtcaacaagcgccaaattttccacctcgtcactgaagacggagctaaacagaggttctttcgcgtcaaattcaagggtgaggttagtattgacacaggcagtctccggttccagaaacaagatatcttctgaccaagcgctaccatggacatgtggcgatggagttgaatggtttcgcaatccaattcctccactcttggtgtcgacaataagcccctcgactacatctattgcgccattcaagagtaaactctgaatttgacgatatgcgccgatcaagaaccgtggcccatcatcattcaaagtgctgctggagtatgttctccattggatgtcgaataagctcgagacactctcgtcaaagtcactgaggccccctgtgaatgtctcaacgactttcgctggcaatgtataatcgtaattctcgagctcatcccacggagtgaagttcgagggaagggttgtattcgaacctctgcatcgaagaggcgctgacagtccacacaaacgattcaaacccaatacactgcggcctggtgtgccataacccatgggacctgcatccttggcataatgaaagacgtcgtgtgttccagagctatcaagactgatagcgtcgtacaggccaataggtgtgactatggcagcaatgcccactaatcctaagatcagagaggccttgaccagatgacagcaaggactggcctgtgaacgctccgtgacgcaaccgagtcgcttcccaagatgttaggccaataggaggagtggaggaaccggctcacaaccgacctgtcgatgcattagcagttcttttattccgcgtgagaatgttggggagataccatgttgtgaggttgttctccggcttcaggataccggtcaacaatgcccccagtatgacaggaagaagcagttgaactaaggaggcataaaaagcagttatgcatagatcccttctggcatatctcatacaacacaccacttaccgacaaaaaccagggcagcaataataccggccacctggctgacagtgagctccaccatagagtatgatactatgcctaagcagcataaatctcgtcacggttcgaagaagctgggctggtatgagcccagtaatccggggttctgcaaaaaaaaaaaaaaaaggacgctgatcttccattctagtcatatagatgattcctttaataaaggcatgagtggcaggctgtgctgcggctcttgggttgctgggcaatcaatattgcaaatacgaggccaagaacgaacatatatcagcaggtgcgactatgaacatcgtgatggccttgtggcgttgccgagccgccattgtcttggccatatatagcgtgcatcttttgccaagggctaagtaagaaagagagaaataattgcgttgaaggcttctcttgctggcacaaacagccccatggtggttgaatttgggaaaattcctgatttaaaccctttgaattgaggtgagtctctcatacaggcatgaagctattctgtagattcttctctctgtgctgattgtaaaagtaatgagcaagcaagataggggcaggcttactttttaccgcacttgggccgtttaggttagatgttcaacattcggtaccaatggatgaccagcccaactattgctctaacagctacaggaggacaagcatcttggcaagctgggaagacttcccgcccgtatgcgctggaggaggctttgggctcacattaaagctcttggctcattggcttaatggtagcagtgagttccgagccaatttaagtaacctcgagtttagtttcgaggatggagtgaaatatctctgtttgctggaatggtctattgcgtcgttgggaggtgtgcaggagagatactgagataggaaagagataaagagggggaaagagtggccaaggacggaaggcaatttttcagcctaacagtgattgccaaaaatggcagtatccacgtcaatcatctcctatgcactattggtccactgcaggcgcccgccccgcacaatcttctgtgacactagtgacatacatagtgctcgcccatattctcgcgggcacctgcaatcccctgaattatgatgtgcgactaattcactctcagtagcgcccgttgagcgtttcatgtgttggccgtgaattatgcttacctgccactgaaggtgtctttggctctcttaacaccatgacgtttatatgaacggcttgaattaacagtgtgctgatcgaatcttaaaccgtccaggcgttgatgaagaaggatggagatggcagggctgtcgtgcatgcggtatataccatcattgtattccccttacccctacgaagcgtttctaatttatgattggctcgcggctactcctttctccatcttggagtagggtcggactacggggagaagaaagaactcggtaatcctactggctgtcccgcctatttacagccctgtcgacgaaagtggccggatacggttagcgtatctcttactcttgttgagagtgccactagaccgaaattagcaacacttcactccgtgtgtttcgagcaccttcatcacttcttgacctgaatgccagtgtcaattttctcccgcgaacgaactacaggatggatcgaaatcagtttcaccacttacacacatagattctttcttgaatcctcattcaaacaatgctatgcctattacagttactctacccctgactcattttctcggcggtactccaatacagtcgtaaataacaatataaaaatagcttccgtatcacgcttgtatatctttcgagggttctagaatgtcgaaacaatgcccctcactcttggaaatattgcacaggatggatcgaaatcggtttcaccatttcctcacagacattgtttctgtaaccttctttcgaagcactcaataccagtttctagaaagccctcaaacaggtgaattgaagaagtttaggtatctatgaattgtgaaatctatatctgcttacacaggctgcacccacgttcccctcatcccgtatgagcgcgagaatcagcttcagccccgagtcacttagtaggagtgttttgttcacttttgctttatttttccttcatccttctcagtgatcccatactcccttatttaaaataataccggaaaaaccgagaatttaatgaacagtgcagctattggcatagtgaacccaattttagtattgtaacggttgtacaacggaattcccgcattaaggatctcccagatggcaacccacgggttgggttttggcgaggcctacctaagaacgccagggtataggatgttgttcgtgacttgatgacagatggattggttggttctcggtggcccatcagtaagttgcggccccataatcgattggtatctggtatgtccgtaacagagaggaggtggaggagaagaatggcgggggtctgacctagaggcttgcgtataaaaaaaagaagagggggaaagagggcggggtaaaggtttgtgtcatcatggccgctctgtctgcctcaaaataggcactgatcttgttcttgttgacattgttgatgcctgttgcttcatctctttcttcccctatatcatgacccattcgcccttctttgccccctaatttcctggccccgaattctccacgtcctacaaccccgcagcgcctacttctttcccgtcaaggtggccagcactcttgtcactgtaaatggcccaacgtgaacattacttcgctcgcacatcaagaccctaagatgcccgtcacactgaagacttccgacaaagaacctgtggcctggacaggctggagatgtgaaaatgccgagaatttccttaaagatgcatgcaagaccgaatactatcgctgcaagcagattctccaaagttccatcactagactccccgacgcctctcaaactcacatcagccccagcactcacggctttgtgcgagcagtatggcatgcttattcagaccaccacaatctgatcttgcgaccggaggacgtgtggttttccatcctagtccagcttagcttctacatccaggcccactcggaggaactgcgagagcatttcgtcgagcatgagggccagaagcaccttaaagtaattgaagctggaaccatcggatctgtggatgtgggccagctggcagtgcagttgaccgggctcattcagcagaacgtggtagacccggagcttcgcgattggatcatgccctctttcagtactactaccacgacggacgagattgtcgccgccgtgattatgatgggaacgatgcaaaaatacttctcctatgagatggagatgacgtgcggtattccgtcggtgactttgctcggtgagaaagacgactgggaacagcttcaaggcagaatcgacaagatttcgacgctcggcgaagagccgacccactttgcatctcttctgaaaccggttctagagaaatttgtcgcctctttcgacgactccccttcccctgacgtaacggacttctggaaccagtgtgtccattttgaatcgatgggaagtggtcctaactacctttcaggatgggtcacggctttctgcttttgggacacagacggaaagagactttatggaccccagggcctagaatgggcggagaatacatatccccggattaacacgtccgatataccaattggatgcgtcagtgtgcccgtcaaggtgaacgataatggttgtgagctcaagacctcgatggtcgctggcatggttggtatcgaggcaaagtccggagcgaacgctctagtatttgatggacaactggttaaaaattctatccagccgttctcgggatggtggatgtttgaggaattgagtgagacggcacttacagaaaagaaagagaaggaacgtctgagggaagaggctttctacgaggaaattagaaagagattggaaccctaaagggccttgcggcaatgactaagaaggtgaaggaatgaagagtgaaatcatgaatgattgctaggctcaggaatgaccagaggcttgggataaatttcctttactactctgtatcatacctgattaggttccgttcatgctcgataatcgggtacttcttaagatggtacggaattctacagtagataggctcatgctttgaaggagccaggcatgggactatcttggttcaactactcataattgattgctaagagacccctcctcgggaggctgtttggaggtagagcatagaggtgtcgaatgtagtattcacaagcgaatatggatgtattcacgaaagaagcaataacttacacatcctactgacaggggtactccggaagaacccccaatatagagcgcgttttggcgttggagcctcgagaatcaatcgaagagggtaggtggttgcatcagtttcggggcgcactgtatagccattggagtttcggaacatactgtagcttccaccgacgtctgtaccaatttccacaattgaggaagacacatcgcggtagagatgtcaataggcagtgaaacgtaaccgcgtgttgaccctaaggtgaaaaactagtgtctaagtacgtgaagatgactggtatttggccttaagtgagaaggttcctatttcggcatggtcttggtaagcatttcctttttcctttcatgcgtcctgccaactaaagctgttatcaaactagtatagcttgatgtggtgactctaggaaggcagagatccaatacgacagacagttgagctctagcaaattcatggtcgctttctgcagaaggcaacatagtgcggacaatagaaaaagaggaaaaataataatgaagaaaaacgtagaacacgaaaaccaaagatatgcacgtaaaaccatcaaatatgtcgctgcaaatagttgctgcaaattcaacacgtgggtctcaacaggcctcaatcaagaaatgtgtccttcaacgcctcctatcaagttggtggttgacagaaaccgagaagcctacaaatacgtcctctatccccggcaatttactctacgattattcacctggttttgcaacgtcgagaggcttgtgtctgacgcgctcgataagttctcccttttgatggaatactggaatttataccgtactgacatttatagtatacattgtggaccagcaaatcagacagtgcctgtaagagatgtgattccaagcagcttcactgtcccattcacgccagtcaatcaaatatattagatttgggttagctggtcaaagtgtctatgcgaagtcgtctctgctatagcagccgactgagttgatctactgtcacgcctctggatggacttcaaatttgaagcacaactgctcatactttaggtatgtgaaaacccaagttttcggcttagggtttatgctgtagatatgtagaggtctggaaatcctgtttgaaactgtactgacttgaaagacgcgggacaaccagatccatggacattcgaccatacgccagtgcaagggccacagcttcttgtggtctcttcatcctggtgttgactatcagaacatgtgagttatgggatcccacgctgatctactggctgataattgacagtgaacctttgggagctcaccagagtggccctgataaccctgcactaccgtcagtgctccacgcaaagccatggcttacacacgattcctagccccgtcgcttcgaacaatgcagcatgtcctaggtggaagatcgcaaaccaaggtagcgagtcaacaacagggtgcggccatccacgtgcgaacttcgttgcatagaaccttgagactcccatttccatgctaaggtgagtgaaatataacgcctacagttgcgctgtgtctgattatccgcgccaagccttattcccctaactacgaacaccactgacatcttcacactattgtaggggcacccatcatcgacggtgaaatatactgtggcgagtggcctattccgccagatcgaagacaagaccaaggtgtcggccgacgagcgtgctccatcgcgtcttccgccctcgtccccaccgccttcgcactattgtggagccctgaacctctggcatcgcgacacattcatccaccatggaagtgcaatgtttatcacaagcgcgttcgtcacgcgcgtttactgtctcaacaaattgtcttgtgcaccccagcgcggcttttttgaagcgagtgcagattgcgatgagcttgagtgcgacgtggcatggctggtgactgcattgaagagagttgtaagtgatctagttgtgaagccgatataatcattgcgcaaactgattatcccgtcttaagcgcactttgggatttccatgaacaggtacgctacgacaactcgtccaactagatcagtccttgctgactcggatcgtacaataggagaacaccctcatttctgtcactcgagtcgaatgccacgcgaacaaatatcttgtctgctcgagctcccctatacaattacgattgcatgctctctctcccttccacataactactatcgacaatgagtcaccagaaagttcgtgtcgcgtacctcggcctctttctccctagtgattctgtgtatcaggtcattgttcgatttgtctatatgatacaacccctgaactccgattagcctataccactacccgaatcacacctgtggctaagcgtataacctttcaaataccttcaagtggcgtaggctactggtatcgaatgcgtgatcctcgttgtcttcggatgacatttggtatctttccagaactagaaaaaggcacaggaatgctgatgttttgtcttacttcctggcagatgggcgattgttcgatttgtctacatgatacaactcctgaactccgaccagcctataccactacccgaatcatacctgtggctaagcatgcaacctttcaaataccttcaagtggcgtaggctgctggtatcgaatgcgtgatcctcgttgtctgcggatgacatttgatgtctttccagaagtggaaaaaggcgcaggaatgctgatgttttgtcttgcttcctggcagatgagcgtacctctgcagacaatcaggctgttagcacaagtccacctgcaaggggaaggagacgcaaagtcttctcatttttagcctacaatttgacattggacatctcaggtacaaaccgagaggataagatcggggcacaggcaagccaataagagctcactacccaagaatcacctcgggcatacaggaagctgcatcataagggctgtcaaaagtgttgtggtatacccagttggttcttatacacgcatttcctatccaagccgaagcactatttgcaaagaccatttaccctaggtgtcacttcagctgcaggttagtcaagtcaaccgcgcgtattctttatccgctcatatcgtctcctaatatatcacgcacttgtcaggaaatccggattccctacatccctatttcgacttttttttaaaaaaaaaatcatatattcgtcgagcccaccggacacgtgggcatgttactgttcggccaggcagccactgtaaagaatttggtgtccgaaaccagaatgtttatgggacctcttggactagcccctagatcctggagcaattttcccaccgtcaatcaacactcatatgatggttgcttttggaaggatggccggattgtctactacgactacgagcgaactagcactcctgcgggggatatcacctaacggatattcgtttcagacaacactactagaacctaatcgggtttcaatcaggtcttaaccgtgttctcttatcagcagaatatggttgattgtattaacctgggacactgcttcctaaaaggcaattgccgtcacttcgatccgggattggttgaaatatgatccgtcgttgccgaggcatagtaggagccaaccgggtattctggattgcttgcttgtccaaatctctcagcaacatggttgtctctgcggtaaaattacaatgattcttgcgctctctgggatataagagctgaaatagggtaaggtcgagtgactcaatcgccgcctcaagtgatggctttgacttcgcaaggcataaagcctaccgcatggctaattttactcaagccattcgttcggcacctcatcatatgcttctacacgtgggtcttgggcgtattgcttggtcatagttgaaccagtggatctactatccctatcggattgaggctgtatgccaacttcaccgagtgattattacgaaatagaatctatagtgattgatacatttatccatgcgggtgagatggcatgaaaatctccgtactacgtccgtgagacattgatagacctcgccgcgggccatgaggcccatggattcgcactgagttacttccccctgcctatgggcgggcgggcggttgaccgtagccccgtgtcatttaatgggcccatgtgtcgcttaccaataaggacttcagttacatgaaattttataattttataatgtttagctacgcacgtatatgtcctataatgctacgtattcaggttatttgagtagaaagttatacaatggatgtgttcagctataaccaaacctagtaaaagcaatggactatccagtgtaagtgaaattgaaagtgtgatccgaaatacatagaaattgtgatgtatctgtattgcgcgtaaatatatatatgactacaaaacatgctgaacctacaaaaccactcacaatataatgcctaccagcgtatcagtaaatttattataaacacgacatactagttatactgcatactaggattcgcctttattatgatcaattatctgctatactagtggttattgggggtaggtgacaagtgatagatttccaaaagttgaaccccctattcaggaaacttacataatctgagggtggcatggaccgatggcaaggcctagacgttgaccacctttttcaccgcccgaccattcaccaccacgctcaccaccacgctcatcaacactcatcaacacacatcaacacacatcaacactcaccatcaacattcaccatcaacactcaccatcaacactcaccatcaacactcaccatcaacactcaccatcaacactcaccatcaacactcaccatcaacgctaacggttcaacgcaacaagcattcctagacaacacccatctctgtttgcctacatctgaatgaaatatgctaatttctattgtagtgaggaagctattgcatcacaagctaccaagggaaaggaatgtgaaatacgtcatttggtactgaagaagcttcagttgttagtttatgattttggctattgaattggcaaagatctaactagggccccttctatgtatccaatgatgacccttcggaacaacgaacacacgatgaagatgttgtgcaggtctttgcttctccgaatactcttggaacactcgaatactggtccctagcaccacgaagaggtgcctgcacgggctagaggctcttgttgtagcagatgtccctgcgaggcgctttattgacgcagggcctaggctgcggagaaattggtaatgcagcggtctcctgcgggtctcacttgtcatcacagcgtccccctgcgaagttcatttggtaacgcagcgcccccctgcgaggcatattgatcacgcagacctatcctgcgaggattgttgttgacgcagacctatcctgcgaagcactcttttacatacacaggggtcattggctgtgagggagcgcaagtcttacatcgctgggctcgtggcagcgacagccgtggtcatggaggctctcaagcccgtaggcacgagaggggcaccatgacacatcggagtgtgaggaccggagttctgattttttttgggctgggaatccggctccttttatatttttttcggctacgtctctaccaaggaaccagttgcgcagttagtagcgagaaccactgtctcgttattatcgttgaagacatttgaagaacgttgaaatggtgttagcagactttgtggcctacagactcaagtttcaacctggattcattgctttcaaaaacctgcgtttagtatggtgaaccactttttcgactgttgaaaagacagtgataccgcaaggatatgattctcacatatcattgaatttgcaattaaatcgctcaacgctgtggcagactgactactctgcccgttttgaccatggtcactagccacggtcaccgtctttttcatgagggttgaagtgcttcagcaggtgccgcaataatggggtggagactttgtgtacccgtggttggccataagacgtgcctcccattgctccctctacaatcccctttgcctagcctcgcgctaacggtactttctgtatttctcgcaaccaactgatgttgcctctactaatacttctgctacctgtcggtgcagatactatgaagatactcccaaatccagagtattggctgttttcctttgacagagaatcaaaaatcgagacctttttggaaagcctagaatagaaacccgagtctaggttccaggacaatgaagtgagttatttcagctcccatggctcacgagctaggttttcgtgatcgccactccctcgcaagattgcaacgctactatcacacactggcgagaacctggacagaagtaagaccgggtggaccaattaaacaccacacgttaatttagacagacgcaggtacggttctgcgacgcagatcttagcgacgacccacgggatagtagatcaaggaggttctatttgtggcccggagagaaattggaaagaattgccaaggtccagacatgatccacaagcccaaagttttcggccatcagtgcccgatgacacggggcttttttgcttaaggggtgctgctggggcaggtgagtatttggaatatcacactgactttggcgatagagtggcaggctaaaccccgacccgtggttgtgttcttttgtgttctcttggtcgtacggtcgaattcgaaatcagttttaaactctaaactcttgcgactttattcccggaacttgggtggggacacgctaatctaattttagctcttcacctggtaatccttgtagggctgtattgtattctctagtaacaacaatgactcattgttatagtaccgtaatcgctcgtagaacccgatggaatccttcctgcaaactgaccgaacaagagataatcctacactgattttcgaaatccattctaattccgtctctcggcggacatatcttttattttccatgctcccgcattcaagcgtgctagatcccattagtagatcgcgttatgatatctttccgcaggcctccaatttgtccttcgacaattcgtacagttatctgatttctgtacagcttttgtttgtgtcgtatgtcccaatgtcaccaatgtcccatttgtttcccagactttaaatactggaccacgcgatcttaatgttctacggaatatctctgctagtgatacctatattggtaattgaaagcagtcactgaaaaactagctctacttccacctcggagcgctttgcgctcgagggagccatttctgtagtcgagtgttcgtggacacttgcaatcatgatctgtccctcgggaagttgtccgaccacatcgtcatcaaccacgacttttaagcctttgctattgatccagatgatatgagggatgaggcaagggtcgatatgcagtttcgccgcaagttcgactttcaaattgcgagaagtgcggcctgtaaggtatattgcatgataggtgccctcgggttgctttccgcttagggcgaacaggatatagaagcatgcaactgcgaaatagaagtgagcgtagaacgaatttgattttctgtggtacgaaccggattttgaagaatgctttgcaggagatggagaactctttgatgccccaacggaacaatatgggactttgggcggacgttcttgacaaacagggctatgggagtgcacttgtatgttggccttgtttggaatttgagccgctccttctgataccaagtttatagcccctgtgctatgtcgatcgtctaagagcctatccttcatgttaccgcgaagagcaagtacactcactagacgggccgatgaaagaacctcgactgttgtggccagctcagcgcggaggacttccgacgtagggcttttccgaggacttatcgacgacttgcgcttcttgtgagacgggacatcgaattttcggccgtttatcgcactctcgttgtgacatcgactggcaaagttcgcatttgcctctcggtccataattcttttgctgagcttttcagcccttttgcttatacgtatcttatcgttccataatttccgttcggcaccgtggtctctaagtaccttaaccaaagagtaacacctttccggctcgttcataacagacttgtttctgtcgttcgactgtaacatttccgtttttgtacacagcctgactggtaccccttttaccccttttgcgcgagtgaagtcggtcggtacaaaattgaatttcagcagaatcactgcctcataggccttcgcagttggatcagctgtccaaatgacacaaaagtcattgacagaagcttcttcaagctgtacctggcagtgtccctgaattcggaggccgctctgggaaggctcgataaattcgacagctaaaagcttgcctttccgctcattggcttctttcagaccacggccttctttccatagctgccacgatgcaaccggatttgatctctggtcttctccctctaaagacacatacacaaatgtcctgtactcaaagaatcccccgttattcgtgggtggggtcgaatctgccacagtgaggctgtatggttgacctttgttgagatatgttacaggcttttcgttgccaggctggtgcattgccgtcggggcttgcagtgtcgcattgtaacggaacctatgaagagcctcagcaaacaataaatatagcgtgcgttgggcataggcgtacttttctctgtgcccatatatccaatgttcgttgacctgtgccgtgggtgtggccaactcagattttgggtttgattgtccactgcaacgactagtgaaaatatcttgatagacatcatatagcgtagagtatccagaattgtgatgaacgagagttgtcgatataccattcgcctgcccaaaatgtgtatcatcatatggccaaccttgggacttagccaacgaagtgaagcaaggcgcattctgagggtcttgcggattgggttggactggctcatcaagaatgcgcgaaatgtctgtgctccactgactcaacggagagagtatgtctcctacgttattgtataagacagcgtccgaccctgatacattgcgatcgtgaaatgtctcgtacttttccacgtcaatcatcgaagagaacgaatctggtgcatggaaaccgcgatgctttgagtaaccgctctctcgccttgatgtttgatcggtatttgcctcgtctgtgggcgcaacatcaatagggtcgtctccattgacacagctatcagggagcattggatctcccatgtcggtttggacgcctctaatttccctttcagcttgacggctcaagaaacgatcaccatatttctcccgaaactgattaatgaactcatcatatggtctccgcatgatttatagttgtggcgctgggatgccaaaaaaagaaatattaaagcacaaaaaaagaaaaaaaaagcggcattcctaaaagacagagcaaatctgcgttactcccacccttgttgccgtctgcactcagcagaaagatctcagcccagttaccggctccaccgctgtgcgtgttgtactcttgtttctcccggcactggccatgatcaccgtgggtcttcgagcaagacatcttcaagaacccaaactggcaacgggatattaggcactcgagatgtagataatctggctagctatcacgtggttcacaccaagttgaacaaggatatttagaataattttgctcctcaaccttcggagtattgtcggataattgtgaattcctttttcttctatacgaatttataataaactcaagaagatcggtgaaaattgaaatggcgtttaggagacaatgcattggcgatgagtataaagtgtggggcagaaacactttcagtacatcttctatccctttttctttttccggggattcttaacgagacacgataattggtagtgggtagatcatttaacttccataagtaaagggatcaactcgaaggagaaccgtgtgattgctgggagtttcctccgggcccattgtccagttagtctgtgtaaatcctcgtagatggaggtaagccccaccggtacctcgcggccaccaagttttataaccggccttcgctggtggctctacatcctccaactgctctagggtcagcaactcgttctcattcgatctgtcaagcctccttggcccagtttataatgaaattgatacactgctttcaatcgacctgaaaagggtcctcaaagcatatcatggagcatcacacttctctgtcttagcatatattatcggaacaacaactactgctatagcaatcgcgttagaggctatgtggatggtttcccaatggaaaagcattgttggtactcctacggcttcctggtggctaaggctagtaacaatttctctttcatctgtaagaccgacgatagccaaagtcaagagttatatattaatgaaagctcagcttgcctccgttttcctggtatgcgcttccgccaccataacggcaattcacgtgtccattaagtcggccatacaggacagtttacaaagtttgggagcgcatgcaagcttgggtgggcttttggtcgcggcttggtttgtagtactactttccgtttctgcctctttcatgttatggttcacccgacttccctgaattttctgcacccgccaacgctgcactatatcctgaattgaatgtttgcagccaatgaaacgttgttgtagtccaaaacaataaacttagattttctttgttcacacaaatccgagttaattccactgggggagtttggcctctgatctgtacaatactgtacgcagatgatagacgactcattcaccgtagcgcttgaggaatccaagattgggcctcttcgccgcgttgactggtaatggccctggtacaagaatattcggctcacgaaagacggaagctggcgctcaacctttgtatcccccaaataactcatgtttctggatcaacaagcagccattcaggtgttagcgggctacgcatcattccacgaacatcaagaggagtaataggtgaagggtatgcttgaaggctgcaggaattacgttggagttatcaaggaattttctgctccttaccgctttcagaacttccagggtcggtgtatatattcttagagtggactttaaaacaagaaaacaacattgaaggagttgtcttccaacctcttgaggtttatatttccagcgaggcccatagccagacaacagggttccattcacagtagcctgatacctaactgcaaattgtgtggttgccggcaggtccccagtacccttcacttgccaaaaattggtttcgcttgaagcaacggatgcagatcaagtgatagctgcaacagcttttggccagagtagaacgatagtccaagcagtgttggaaagatgccaggtaacgccagaacgcactaatcaaagcctttacagactaaaggagagttgcgcaaatagtggctcaagcctcggtggggtgaggtcatactactgaggtaagggcgccattttaatcctgatgggtgagaccagctggtaccaaaacaattcttattgatggcctcttttacgtttcgtgaaattgccctatttaaagaacatcactgatattgccacacttatgaacgttctccagtcaccgtataaattccagtcaacgcattcactgcgatttgagaaggatattttctgattgagtggccctacgaagaatggaagacctagagcgtgtgggaaaattaattgcattagcactttgggccctagccctcgtcgctattggtatcttgttcggtggatgcacatctacgtcttcattatcacgcttctattttgttatgaccttcatctcgaaggctgagtctaggtgtaatggcaaagagctgtcacggggattcggcacacacgaagattcggggtcgtcgacttcggactagacatgaaccatgtatccattagacttccttcaatctggaagacaaaataatataccgttgtttgtatttctggcgaaattgattcctcgggagccttatctttggctgttccagttccatcagctactgacgctccgggaggttgatctatcaactccgacttgtcgcttcttttcctcttctttttcttcttcttttccgtgctggccatatcgctgtaggttgttggaacgtcctttcctgtctgtttcataagtcgataggacccgcgagtttcatgtggtggagtcgaaggggtttctataatcgcttccttagcctgagaaataggctcggtcgcacctccagcaatcacgagtcgagctttgtaaactaaagcgaccgttaatgatccattctctcagacgttggcgggggctaactcaccatgatcggcagcgtgggcgataaccagattaaggtgctcctcactgtcctcaattccgcaaattgtgaatacctctcgtatctcctgggctgtcaggcccaaaatggctttatccatggcgggagatgatgatggcaaaagactaagactgcgtcttgtcaatgaagacagaaacccttctggaacgatcggggcaacggttgccctctggcttggggggagggaagaatgagccaatcaaatcaaccacaggcgaggctcacaaaaatagcatcaaccaggccaggcaagacttgaccgcgattgacccctctttttgttgtgtctgtgtcggccattccatatcaaaaacaaatcaaaccatacaactatgtaaatggttctttccgtaaccttcaccgtcaggataggtgcaacgcccatctggtatatgacttacgcgcaaggacaggacagagctttagagaatattcgctttcttaggtcttgatctggcaatgttgggaaagacaatcggatcccatcccttgagccagcggagaacccatcggtgggtgcgttcgtcgccaatgaggtcggtgaatttccgggctcggtatttctcagtccacattgcatatgttgctttcttgctcttatggctcatattattcgattcaatggatcgttggacagcagggggcggcggcggcggtcttgaagctttctcctggctttcttgagcagcttcgtcaagaagtttatggatatcaattccgtagtagctcttctgagcccatccgggggcggttgtagatcggccagcaacaagtctctcgtagggaatggcaggtttgctaggtctcgaagcgacattatgcgatttgcccgagcacgttttgatttgaaataccccaggcggctttctcgacggaccgggagattcaacaataggctctcttgcgacaggaggattggccaaaggcgtcgagtcgggcgacttttgcggcggtcctaggataatcggaaactgtgtgggttgcacggtgggttgttcttgaatctcgaattggctcatctgcgcatcgccaaacgcatccaatgcgtcttggtcctcgtcctcgtcctcgtcgtccaggaatcctcccatgattttctgccgcttgggctcggaggattgcggcggttcgtcattctttctcttctgcgggtctgtaggcgaggggggtcctgaggggaagccagcgggcgaagacatgaagggcattttcaccgtgggaggagaggaaggtagtagtggtaataaacgagcaggcgaagagggtatgatgtgttgaaactgtttagatttggttttggttggagtgtctgccaattagtataaaccagttcaagtcttatctgcacaaccaacttaccaggtcttatatcgtcgtcactgcgaaaaacatccgagagattccaggcgcgatgctggatcacaactttatcgcgagtttgttcaatgcgctggatgttcaaagcctcgaggtcgtcggagaaggactctgaggggagatctaggatatcggagtggaggtgtaaggccggatcgaaggaagggggaactgatggagacgaagtcgtcatcaaaggcgtttagagagtcatttctgtcgtggatatggttactggaatagtcaattgtgtctgctgtggttattgtgagtcttgagattgaagttgaatcgcgaatcttggcgcgtcaagacgcgtagaacacgctagtcccgatttgtcattaatgtatactgcagcgacaacgacaacgacatctcgacttctactcaccagactcgtcttaaatatcgacttttgaatagcagatttctcaatctctaaatctctcactatgtcttctcttacgatacatgataatacagccaaaccagtcctataacggagaatctcatttatatcagaatatatcatgaatccagtcccattgaccaattcaacctcaaaccctctggattgagaatacccgggaccgctcaaacatccccgatgaagggaatgtcggtccaatttccatgggcaatatggatgccaaccttggtggcgatcaaagtaactgcgattccatacgatacgtacttggcaatttcagctacaaattcgacttctggctgtgtgtctagaatcgtcgttagttctgcgaatttgcaaaccacatcaatgagagagaacatgcctttgacgaagcgctcaagcgctccgctccaggacccaaggaggagaaatgtatgagttgcaatgtcgagcccactgtcagtgtcattcttccctttccaatgcggcgtcttgatttccaagacactcgttgcgacggaaagagaatagacaatggcttgaaggattgcgtccatcacagcacgaaccttgtctaccaccatcttcgagagcgctgtcacaaaatgcagtaggatgttgaatcccgagttgaacaatgaaacaaaccagccgatcatctgcaacgtataccctggattttccttattcttgggaatgctgtgcaacgtataaattaaaacaacagcatccagaatatgttcaagcgttactttccctccaccactggaccccgacaagtcggcaagagccaccagagatgcagttggtgaaggctgttcgactagaagctcctcatacaagtcagttccagactcaaaggcaagtggcgagatggaatctgggacactgagaactagggatattccaaacgtagctgctcctgtgatggcagcaaatttgttgaaatctgcatctttcgcagattgaccgtctgccatttttttaattatggcagcgtaccgacccctcggaatggccggcagcttatcaccagtcgctagctttgcaatgaccgtggcgggtatggcgataatcaacgccaaagcatcgagaatggtcagctcattcccaggcgagatccacatcttgtagatggaggagaagatggggacgttgattggagtggtgaggagcccattgaacttgttgatgatggttttgatgatattcaaaagcagctcggtcagtttttccaccccgtcgatgcagtcggttagaaacgtcttttcggtctgctcatgggcatatttggcatcgagtgagcgtttcccctggggttgatattcatctaccagcttcttttggcgtgctgtgacttttccatggtatttgtcctcgaagtttttgaattcctgatccaaattcccaattgcctggctttcctctggagttgccatatcggaactgaacacggtctgcagaaacgtggatgcatctcgagcgcctccatgattgaacttggttcgtgtcagcaatcgataaattccccagagatgctgctgcgtacttggtactgtgcccagtttgaggccatagaattatgaattttgctcttagactgatctgttgaccctgttttatcgtctgccttgataccaagcttctccatgtcgtgattgctgggccgactgtctgagactgatttcttcatcgattcaaagagacccttagattttcccttcaaggaatccgtcaaaatgggtccctcttccaaggcatccttgacaatgttcacaatcgagtcttttgtggctgtgatgtccttccagttaaaaacgaatcctaaccaatcgatgatctttttcccaatgtcaagaattttgttgaaaatgacagacaagaccttgcccacttgatcaacagttttcatggcccattgatagactgtctctcctatctggaccagaactttggctccattcacgatgaacgaaatgatcttgtcgccctgtttttccaaccagtgccaggctccctaaaccagatctgttagtgagtcatcaatatcaagaagagactactttctcaaagcatgtccttgaccccgctgccagctccctggattatgtgctcggcattaaatctatagcaggattcgagtgccaccgaagacggggttttcccttgggcgatcgaatctctcgttttcatgagttgatggatgtttcctgccacttgttcaatctgctccggggtcagcttggtaccgtcgagtagcttccctttgccgggacctaaatcgatgttcaaatcttctttgtgttgaattttagacagcttctggttgatcttatgagctggatcaacaaacttttgcgttgattttgtagaggcctttgaagcatcggtgacagtaaacgtgtgtgttgaaatgtcatctgttggcacagtgagagtgagcaggccagtttggtctgtcctgactgatattcctttttcagtggcgagaacactgcgaccattaacaatcacactcgtgtccccagacgctcgcagaatcaccggatgattgaccaaaggaccaccagaggcgttgagtggttttatttgggtcatgtaggactgcatctgaatcgtcttgtccaaggatggctgaataaggggaattgttttccaaatccctgattttgcgtcctgctccaacatggacagattgccaacattgttagcaaagacaaatgtctcacacgaggacgatgttgctttaaacggagcaaagtaacctccctgatgatccgggaccacctgcactgggggatcgggcgattggaaatcgagatccgtcatgagatatccaatgccattgtcagtgttggccgcccacagcgaagcttttgaactagaccttgtgacttggacctccttgactgaagagaagaccccggtatctgcgattttatcggatgaagggtgagccaatccctttgctttgaacctataaagaccagaacctccaacgaggagatcagtgaagccatcggcgttcggtagagctgccagagctcgaggatctaggtctgttaggaatcacactatacgggggtttatgaatctcattaccggatggagttgtgtctgtctgaagtcagttatgtatcgataaacccttcagaagactcaccagaggcttgcttgagaggcacttcaagctcgtgagggacattgatcgagtaaaaggtaatagcttttttgcctggggtactgattaacagagttctacactgaatgctgctctattggggaatattaccttgaatcaagtataaaacggcatgacccgggattatcttggagccatacttcattaccaaaggctgtactgcgatgatcatctccgcattctctggaagcttcacattgtcctttttcatccaggaatagctgtcctcagacctggttacagccgcagacgcaagatcttgagagtggtagttctcttccttgaaagcgaaaacaactggggggtagtttttgccaacggcaggggcctgaaggtcaacattggtataaaatacattgaacaagacttaccatgaaaatgtcaaacaccctggggttatcctcaccacttccagccatgacgaacgacttgagatctaccgacgaggatgaaaggtccacctcacgaggttcaaagggccgaagcaagcatagcaagcttcgagaggcattcgagtcatgcgcaatggccactgcgacatacaacttggacgctgcgtcctggaccacgtcgaacgcatgaccggtgtaggaggatgcaaagcccagcataaggcccagatcacgcacgactcgatttccagacttgtcgagggaggagacgtataatttggagtcggttcccaaggagaagagcatcaattggccatttttatcatggacggccacgaagcgacgggagtttgggacagacacagcggcgacatactgggtcatcaattcggaatcatgctgaatggtttccatggtgttggaggtgcttgaattcttgataaagagggcagtaatggttttgacagatgaatgaattgtgatattggttaagaatagctggatatggcacttttatgtctgaaagttcacatattatttttgaatgtcaatactgatgatgtctaaaggtacttttgcatccaactcgtacagctgtcaacctgggcagaagctgtactcgatgcagatctaaatgaggggatccaacacggaccaatgatattgccttacggtatatcaatccctctagctaagatgttacacaacatggtctgacatttaagactcgttattggggttctgtggctggctgaggataaggagcacatgctacctattttagccgactccacatctccatgcacgataaagtaaatcgggaaatgatatgccatgagtctacgaacataagcggtgaacacagcctttcgagtctcgattcggttacatttgtgggcgctgaaataaatgtctcgtacttcttgaatgtgaaccttacatcactgtctcacttcagctgaagcatccctgctttgggcaatggattcagctggcatgtgttgatacatcacggcgatcatgttcagctgaaggaatacttatcctaggtggcaacatggatttgtatactgctactacacatggtagacagtatgagggatttagagagttgtgcttgacgctgtttgggatgatgaggtaatagtaagtacgatcgatgcatataagacttgcaccttctttccttctcaaccatcaacatccttgaattcacccttggaaatatccccaccagaacagacatggcatcggaaaaagacaaacgcctccagtcgtctctcaagaccgcgactggggctttcgaccaagccgtagcagtgtctcaagacgcgctcaacgatggcctgtactacctgttcgacaagtacgaggacttgcagaagatgaaggtcaacaagaaaaagtttggccggatcgatgcgatgatggatcatgccgaggtgtctctgccggtcaagtcttccagttatcggacgctcgttttttattgcatttttcaaacggggaagcttgttctcacggatgatgatgggtatggatcgatgcaattctgagtgtatgatggcactgacaatggatccagaaatgacaaaaagccaatcgacctggcagactggcggtttgcattcgaggtggactataccaccctcgatgtaccatcggataccaccgagcatcaggaggcgaagaaacagatgaaccagcctggcgactactccatcaagagacttttcttggactttaaaagtgagcgatgaagctgcctattcgtagcaatcactaacactcactagcccacaagatcagaaatttcaacaaggacctgagcgatttcaagggccacaattgggacagtgaagacttgcaaagtttcctctcgctgataactttctggggcgaccctgaaaaaggcgttatgaaggacaagcaaaagtcgacactgggatactttttgacgactgcgaagcccgaaacagtcaatccgcccgcaccgacattcccacccacctccgtgaagcatcagcattacaaatacatcgcacctgggaagcagacacccgacgaaggaccgaaagatggcaagaacaatatgcttttgtacttggagatgacccagaaccgttccttccccagtgaagacatcctggagtattcgggcaatttcgtgactccaggcatgaagggaacaacgtgcatctcccgagacatcttttgggattcgtatcttctccggaacccgtctctcagtggtccctatgggccacagcctcctcttctgcgcgagttcaatcgacatgtctacgcttggcttggggaattccacgtctgggccaagaactattccaccgatctttcatggagctacggatttggacacacccggtgggagccatctcgaagcccagactacttcgcatggaagaaggtctctgcaaataaatgggagtggaagaataaagacaaaaagagcggccatgatgaaggaatatggcctctccgtttggacgcaaaagcgagcagtaagcagtggctttggcattccataatgaatctttctaatgacatcttactaggtgatacgttgaatgaattgaggtttgacccagggagtaacaaaatacatctcgaaggctgctcgaaagtctgggcagaaatgaaaaggagcgatttccagaatatagaagaaaagtgagtgttctgacatatatagcctatccgtacattatgttgatatatgtgatagaggcggtgttgccatcaactgggcgctagatatcactatcgactcagtcagcgaaggagggctgaaactgaacatgaatcttccagccaatcccaaggacattttccacaccactgcactgacaaagccatttgctacagaggccgaagagacgcaggatgaagccgagcccgctgagaatgaacccgctgagtccaccccgaaaacaggaaagactggtaagatcagtgtccatgacatgacagaggcggcgaatgatgcagctgcaaagctggatttcaaaagcgtgacgagcaatctccagactgcgttggagaattcagcgcgttttgttcttcctggaggccggcagttcttctacaacaacgccgtctttggcaataatggggatttgttggtggaggccaagtacaagtcttgatggactgtgagctactatggtgtacccatatctatattcatatagttataaagagtagagtgtccataaaatcaggtatacatctcagctcgatcctctcgcattcatccacagatcccagcccaaagctcctccttccaccctgccagctcaactcaatcatctgctttgcaaagattcgtagatcatcttcatattctccaataaccctctcatccaccatattaccagcagcagcaagtctccgtgctagatccgctgcatctcttaaggccgtgttggcgcccattccagcagtcggtggcatggcatggattgcatccccgagcaacgttactcgtgaggatttccaaataggcaactctgggggtgctgatgagatacgcagagtcgatgtttgtgctctatcctgcttttcgaaaactgctcgcagcgcaggagtccagtgctgtgtcagacggagcgccagatcagccgattcatcgttcttcagacgtagcttatcgctgcgtggatggtccggacgaggactacttgccgtcttgtctcgacggggttgacttccaggtcatcctcccacaacacggccttccttccggcgtcactcagcagcttgctgatgctttggcaactgctcgcgagagtacgaccaccacggagcctttcacggactggcgtgtaagcccagagggactcgtcctgctccgtcgtttgccaccaaattcccgaaaccactggcaagctgttatcggacaagccctaggccgaaacgatgaggaagacggcacttgctgcagtcggtgcgagacttaagtgctgacagtgctcttctaggctttccgaaaacactaggatgtcgtccagataaacgaccactgaatcgccgaggaagtcgcgaagtgtctcattcatcatcgtctggaaggttgctggtgcattacacaacccgaatggcatcacacgccattgatatttgccccagattgtgttgaatgcggtcttctcgaccgcatcttccgagagtctcacttgccagtatcccgatgctaagtcgatcttcgacaagtacttggctttcccaacaatatccagtaggtcttggatacggggaagcgggtagccgttcttggcagtgagttcatttagggcgcggtaatcgatgcacatccgccacgcccctcaggcttcttgacaaatataactgggaatccccatggactcgaagacgtctcgatcagtccacgctccagcaagtccgcgaattgccgcttcaattccgccaatttgtccgccggcaaggggtaagcttgccggttcacgggatctgcgtcccgtgtgtcaatgtaatgttcgtatgacctccttggaggcatctctttgggtagttcttcaggaaacacatcctgatattcctggagcaacttgaggatcctgggttcacttgaagaagcttccggggttgttgccttggccgtacagagtagcatctgtgtctgttggtcgcgaagggcgcgtcggcaatctttcttcgacagcaagttaagactgctgacggatttacgctccaggatgcgcgtatcaatcccatgaacctctgtacgcttatccccaagccacatcttccgttcaggaaagctaacatattggctatgttctttcaggaagtcgttccccagaatcacatcgtacccagcgatatcgatcgcccatactttcttcctcccactccactcgccaagatgcagatttacggcacaactcccttgcgtgcgtaaggtctcaccattagggagggatactggaagggatttctttttgtcccatctcccgccaacgcgctttgcggtggccagcgagacgaatgtgtggcttgctccacaatcaaggagcatccgcgcgacaatggccgtccgcgcttcgggtcgctggaccttacgatcgaagtaggtcagctcatctcccagggcgttcagccgcatagaggcttgctcatccggcaatggtaattctcccacttgcccggcttcaaccctgctggattggatatccatctcgacgtcatcgagtcgaggatcatcactttcttcatcctctaagaggtcttcaacctgaacaggttgggtctccatctcgatatttgccaatcgaggatccttattgctgtcagatccggcgactctatccgcacttgctccgcttccacgtccttatttatccaaagcatgcttcggatcgcccatctgccttccctccaggtggagggaaccagcttccgtactcgcctcaaagaacacgatcgtcgtcctggatgtgggactatgtacatcgtgtctgtgccgccaggaagctgagataccggcgaacagaacgtccacactagcagcatgtcatcgactggagcgctacattgctatgtcgaagaaacagtggccaactatttcgatgatatagtcctggtgtatgctattaccataaaggctgtgcttactcgacaatgaacactcagcacgagagatataaatcactccatggatttcgtataggaaggagcaatcacccttgtttggaattacaacagtagtgagaaagttccaaagtcaaaggtgaacattcgagcatggtcgtggtgcctctgagcaggcccagctacacagtttcgtccttgtcattctaaaccaggggcatggcccatgtggcctgcaaaatattgcggacagtgtataagaattcacggtactatgcgcgttcccatagagagataggacagggtaggaaggggctctggcactgaaattttcttagctcagtaaaatatacctggtggggtttgattgaatcggtggtcgaaaacagtgtgatctgtggagggaagcgtccgatctgctttcgacccacacccgagtcacaaggaaatttaagtttgacacagactgcggaaccacgagcgggactgccgatcagtagcggaaccgcaaatcatttcgaaagctcgtttgggtgaaccatggaaatgcttgcacggtgagagaatgcggctgtaattaagaattcaagcctgggtttctgcctactttctttctgggttgctcgtgattaagccttgcagcccgaaggaaaagagaactagagcagaatcaccacaatctccgtcggctggtatgtaggataaatttatttcggtaaggccaatattttattagagattttcattaaattcagtatcatgatcaagatgtgcagattgattgaaataaagtttagggccgcaggagggccggtccacattgaaatcttgtccggggccaatcggttttagtaaaagggaggcattttatttaagctcatgtggttagtccataaatggcatagttctttacaagccgtctgctagagttattgaaatagcggtagatttgaagagatggagaggaagtgttgttatggcctaaagagagcaataatcatgggggaaaaggcttattgcaggagaagatacgtagcttctagaacgttctacagaccagataggcaaagttctgcttgccacttgacaggggaatttactttctcttcactgcgaccaagtgaacacaaccacggatcgagttgtagcctaccattctgtcgccaaagtctgctgttattccaaatactcgcccgccccagtacctcctaggcaacaaagtcccgttccatcggacactgatggcaaaatctttgggcttgtggatcgtgtctggacctttgcaattctttccaatttctctccgggccacaattagaacctccttgatctactgtcccctgggtcgtcgctgagatctgtatcgcagaaccctacctgcatctgtctgaattcacgcgtggtgtttgattggccggtcgggtgcttttcgtctccagggtctcgtcagtgtaatagtagcgttgcaatcttgcgagggggtggcgatctcgagaacctagctcgtgggcctttactaacagcggccaactttaggcttatagatcgtgtctggacctttgcaattgtttccattttctctccacaaatagaacctccctgatctactatcccgtgggtctccgctaagatctgtatcgcagaaccctacctgtgtctatctaaattctcgcgtggtgtttgattagcccgtcgggtgctatttgtctccagggtctcatcagtgtgatagtagcgttacaatcttgcgagggggtggcgatcacaagagcctagctcgtgggccttagttgtatcagttcacatggttatcctagaaactagacccagtttcttgtctgagcttttcaaaggtctgggccctttgggaagccaggagatgcgaccccggacaaaatctcggagggaagtgaggttgcgaagaggataaccgaccctttggcatagatactggaggagaatagagagaaggagtcagcccatgatgcgacacatgaatctcaagataatacgaggcacccatctacataccccgtgaatatttgaagagccctataccggcctaggcatccatcgaccaggatggaggtcggtagcgggagaatattcaccagcacggtgaacgccagattcaccatagtcgctcgagatttgcctagacccattgctcccgggactaagtcattcggtctattctgcagatagttttctggggttgtgtttcgtcagcggaggcagtgcccatggcgctgagacttggagagcatatactgacgaaaaagagtttgcgttccatagtatgagaatcgcgcggccattcctatagtggccgccaaccagactcgcatgggaagaggctctgacacatgcgtaagttacaaatctcgtcgtcggacgccagactgccccctggagcgggggccgtaaccccagactcaattttaacttcaacctttcctacggctcatccatggcggggtttcttttgttttggaaaccctggacgtgagtttgtttcagggattaaggagattggaaatccgaatataggcaagagagcaagatcggtgctagctcgatgaaggtttatcggcatgatatcggagtcgaagccggagttcggagtattgacacatcatcgatgccgagaaagctccgtaaaatgacgaggagagatttaacttccagacactctgactggtatccatttcaaggagaggaaagctgtaacgtatcagcaccaaatcccagcgacaatgcctcatgaagtgtgtatattgattgatgacactcaaaatggtagtgtaaactcttctcccgatgagccactagaactctgtgcctgacatttcacagtccacgtggagattgtagctaccagtcttgagccgctgcaaaggggagacataaatgagtgcagtgtgctaacggctttggtgcagcctttgagacgggaggtaatcgataaaatccgaggcttgtttccaattacccgatcaatgctggtgatggatgccggctcggacacacccgtcaaggccacactggacccagccaatattagctccatctgcacatgtgtgggcgatcaaaaaggccagcaaaccgtcctttttatcatcgccaaccgagaagggtatgtggttcgcagtgacctattccaggatcgactgcgcggttgcccagggatccagaaggtggtcagcctcgtcagcccccggcaattcgtcggttttcttccagccacggcccatggtttggcaaaactcgtcgggttggccgtttgctgcatcctggccgatggtatggacgcagcctcctattgacagctgtcagatcacatgcaattgcggctgcgagagaggctctcattgcagtgacagtcaccggcgacaattcccctacacaggcttgccgtggtcggtgaggtccgcccggctcatctctcttcgcgattcttccaggccgctcgagccttgggggtcgagttagtagccctagggccccgcggccattggctacaggatccagaatcgcggaacgacccagaccgagaagtctttattgaattggatctgacggtggatcctggccttccgcatcggattgtgactactattcaagactacgctggcgaaatcgatggactaagtacagtgactgaatatcttcttatacctgtcgcgcaagccgccgagcgactgggtctccccacctcaccatccatgtcgtttagcaagtccgtcaataagtaccagacgcgcttagaggacagcccgagctcctgccgtctggtctcgggtctggatgcttttcaatctcagctagcatatgaggaggaaggaatacttcctccgggcccgccgtggattgtcaagccctgcaatggctggcattgtctaggggccaccaaggtagccacgaaggaggggctagtggcggctgtggagagagtcgccaaatatgccgcctacagccgagatggaccaaatgcagaagatcctcaatggcagaccaacgtgttgattgaggagtactgcgatggactggaagtcgactgtaatttcgtcctatgggacggtcagatcctcttcttcgaggtgattggtaactttccgtgtgccggtgacaccgtggcagagggcatgcaaaccacggagaatttcaaagaaacacagctagtgttttcctcggctctgccaccatcggagctgtacacgctgaaatcctctctttacgacgctattacgcgtctgggcttccgctccggggtcttccatgtcgaggctcgggggggggattcgagtaatcggtaccgagccgcggaagacgacgagacgctggacttgcgtcccagaccgaagcctgcggcacgccgtgcgacagtcttcctgattgagaccaacgccagacctccaggctatgtggatacctgcgccagttactatgcaaatggggttgatctgtttgcgctccaaatcctgatcgcactcggagacgaatcaggtcacgagccttgtcccagccattccattctcgtccccacgttgtggtctcagcgatccaagcaacaaaggccgggattatcgcgtcggaagacccttggaaagatattgtccagaagaatcccacgttgatgcgcagtgtggtgcatcatgtcatgagttttggcgagggtcatcggatccagaatccgcggttagacactacaccatggctttcagcgtttactacatactcactaaagaatcgtgcggacgcattgagattatgttcacaggttaagagagagtctgagtgtgaaattgtttaggtagactgagccttgcttatttgcgcccttccattgcgaaccctccaaagtaaaacaaagttcttcgaaagtcttaaatcttctttaacgaggtcatcttcgtttctttcaacactgcatttgaccaaaagatgccccaaaatctgtattctggagcagttgaatcccatccatatccaaggaaaaaaagcctatcgaagtcgacgtcgaagttgcgctcagaatctctataaggcgcgggaatcttcaaccgcggctccaggatctcatctagaatacgagtgaaaacagctgcagtccggttaaagtaagtagagctttcctgttcaggacgggccgtgagctccagatgcgagatgaacacactcaggttgcgaatgagagacgcttgggatcccgagtagagcatcggccggcctgtctgggcctgtttttgcaatgctcgaattaatacgctggcgcctggaatcccataaagaagaagctagccagactcgtacgttagtgtaagtaaatatccacgggtttgaaagagacgctcactatccaggtgaggtcgcgttgaatggcaaccgattgctcccactgtcggcccaagatcaagacggtggagagtatcgttgcactcagtcaaggtgggaggcacccgtttctcctgagtccttgctcaaaaggctctggaccagtaactcattatataggtaggccaagtaagagatgagaagcatcaatttcacactggcaggcagatctgttccccagcactctagtgtgtaatgaagatgctcgggcagcgaaatccaggcttcattgtagcgacgagatacagtcctaacaggcagtcgatgagtatgacaacacaaccgcttgtgctcggacatcggtagtaaacttacatcaatagatcggtccgttccgggcttgacttctgcaaagaaagctccgagttttcttctcgaaatgtgccgacgatgaatcacaatcgtatccaggtcgctctttggtaagcctttcccatattccacccctggggatccagggaggtctgagcagcatccagaatctcggggtctcctgttagtacatgatcgccaatgtcgagcgggagacaacaatctgagtgtcgccatgaaatttgtggcggacgtccaagaaaggtcgcaatacctttatcgaattgataggcggccgcgaagagccttcgtcgagattctagaatgaagagcggcagtgccgtcgagctagtcgtgtctctatgcacgcccaattcaaatatattcgtcgcgaactcaccaagacgctgccaggtgatcgaacctagaataagctccccgtcagtggtgactgcctttgagcggaatccgaaaatgggacccactggaatcactgaacaataaactcgtccgcaactcttacttttccgccctccagccataatggaaagttactcttgaccagaatagccattccctacgtttaacccatagcatgttcgcgttcccgctcgtcaaagatacgggggcgttactaaatgcgcgctggcattggacgacgcgcgtgaactgctggatctgttgctcggtggccgatgggccatgcggtgtcctacgaccactacgattgaccggtgcgacccagcaatgccggtcacgccagtgcttacgtatagtcctagctttcctagcgataaatcgataatactgggtcttctcacataaaatgtaatctagatgaatcggtaaattggcgatcgggctcgttaccgcggtcggagcttgccattcgttacattgttccgtacggtcccaacgttggatgatatcgccgattcggccggcgtatgtaaatgacctttcgtggttttgcattagaagccttgaacccgattgggtcccagacataaatcgacgttgtggcccggcccatctgcggccactaaagtctaactatttcaagcactttacgcatcttaaccaagacgctcaaaataggaaatctttctagatttccgctcttttacggtatcctttatattaataggccgagattgcggtgattttgccccgattctcgtgacttttctcgtgagctactatagaggcttaatcacgagcaaccaagaaagcaagtggggcagaagcctgtagataaactttcgattatgttcgagcccaaaaccttcataacaaccgcattcttttccgatcaggcggttccatagctcatcgaaactcatttgcgaaagatttagaggttaactactaatcggcggaatcatagttccccggtatttgtgaagttaacttttccctacaacttaagtcaaagggtcctatcattattatttggcaggggaaaactatgcatcacgccaaacattggtagtgcatgcatcgaaaatcaactgcaagcctcaaccttaacactagagagaacttttcttccgacccacccatccaattctgtctaattcccccgccgccttcaccattagcaatactgtacgcatctaattcgcgttccctaaccaaatctcgttttgtttcgttttatacgcgttattcttgctacttgtttgcgatccttcagaatgtctgacttacagttgagagaggattcgaaccaccgtggatcgcgtcccaatccaccacctccgactggcccgcaacaccctccccaacctccgtccccagggcttcaaaccgcttaacgaccccttcccgatcacccttacccatctcctgaatcaccttaatcttgacctgcaaacgcccaactcgaatctcaataccgataatattcttcttcagcatttcaacttaagagtctggcgcctcgggccccgtcctcccctctcttcccttcggggttagactccagtcacctcgatgcctccttgtggtgccaggaggatggcatcaatctttctctttctgtagggcaacaccgaacaaggccgatcaattccaggcaaaaagagtcggaaggtccagggtcttcggagtatcggcgttcgaccccgccgaaaacgccagtctggaatgcgacctggctagtcatcgaccctacgagaagacatagagagtggacatatagtacacagtttgttttacattcagacaaggagaaagagactggaacgaaaagaaatccggttgttgcttagcgctaaaagatagtgtaacttcgaccttttcgaacctttcactcgaaatctcccaagctaaaaaaacaccccatctaactagaatctcagattgatatcagcgccgcattcgaccaacgcctcgaccatcgaagcgtgcccgttttgaactgcaaggtgcatggcggtcagcccgtgtccatccgccatggacaccgtcgccgccgcaccatgcatgagcaacaagcgtcctacccttgcgtatcccagagcggcagccacgtgaagaggcgtgcgtccgtcgttatcctgagcttttacgtctgcaacatgagccagcaacaccgaaactatatcttcgctattcataatcacgccctgatgcaacaaagttcggccgaaagcctgcccattgcatgccctagcgttcgattcaatctccgatgacggggagaggaggttcggatcaagcggaaacgacgtgtctgaaggagggacggcctttgttcacagattggtttttcgtaaattcagaagacgagggaagagagagacaagggaagggtaattaccactgaaaagtgctcctcgactcgagagctcactgttgaagagtctccatcgtgtactgttgacggggaactgtataccctcttggcatatcctgccgagggaaggaaccggtgagagagaggatcattaggttccgtggacggtgggtctatcggttgatcgacttcgacttctggaaaaaggcttggtaatatcgattgagggtgcatacaagggtttacaccggctgatggcaatgggcaaaatttttgttggccggaccgtaggtctgccaaatgtgttgaggggttggtgtcatttcctgggtgttgaagactttgtcgcagccgatcatacttttccaattgctgcttgacagactcacctgcagatcccagatgaggtttgctaacgaggtgaaatggagccaagagcgaaaataacaggagaactcacgatgtttacgctgtgcctgccgattgcgttcccgtcgctggtcttccttggacatttgaacaaggacccgcctcgctggacggatcggtgtttgagggtatccagacccaggaagatcagggaatttggatgagggcatcgccattatcactcgagtggtggcttctttattcgaatatgaccggaatgattcctatgctgtccggcgcggatggccgagcaatgacgagaacaaacagtggttagcactttcctgggcttaagtcgggagaaacctgttcttagaaggattttatggtatgtcctaacagccgagggccttgtgctgcggccgccttgctagattctccaggcgtggtgctattggagcatctaatacccacttcattaacaagcaccgttacttccactcgacgagatgaattctttccaaggagatatgggtgggagcctcggtgtacgaagccaaagtacaggaaccatcggtaaatggtacctttttttacccgggtaggcatggactatcgccccgttgtccgatccgcgcagaggttagtaccccatccaccaacagccctacgatggaaaatgcaaaatctgaccgatctggtgtgatacgacgtcacaaaccaggaactgatgaggggtcaacatcttagctaaccaattatagactagccccatctttcacgtgcgggctattgggggcgggcaattatgccggtgcaagtgcgacgtgctttttgttaattgcccttgcggccgcagcttttcgccatccgaaggccagaatcgtaagtcacgctttgaccaagaatttgtctcgtgaatatttactgtgttactgtgtcttggtcctagagcatagacaaaatataatgttacatttgatgtgaggttagtcatgttactctccaacatctggccccataatgcgggtccccaattgtagttggtgccccgcgcgatcaccctttaggttcaccatgggtcggagacccaaatactcacgcaatattccctagtatggtcacacgcatttcaacggcatatccttgcatcctctgagacaaggctagaaccaccttcggataggaaagttgcgaaaacctgttcgcgccagtctcatctgtctaccattttcgatatcaacatcagcccatctcctaacactcggagaggcctacctacctagatacctaggaactacatcccgtagttcgaaactaccaatgaacaactacaaccctgccagtttatctgtctgataaatgttcgaataactatcgcgctcggattttcttttggcaattgcgcccatagcgggtaacaaaatctcgggttcagtttagttctaccaatcaagaagctcaattctcaaccgcacgcgatgtaaccggaccctggcttagacctgaattctttccttggtaattatcttctccaggaatccttgacttgctcgtgcttcggttgaggcgttcctggcccccagaaaaatacacaatggatggatgacgtcatttaccctaacccctcgcagaataacgtgatatgtgagaatacaatggacttttgatcctcacgccttgtttctcggtccatacttggaaagatgctaattcatgttgagatacacagtaaataatccttatctactgtataaatagatctttatcaattttggaacgaccgctttaggtttaatactgtatacactgtataaggaactcctatccaccgctagctcagcgccccccagtcttctcatcactaatatccaacagctattagagtctctgcggaatacggatatttcatcccaacctaacgctactttttattcgcgatatgatagaaagcctgtcactattgcacccacgtcttgaaaggctgacacggctggatataggaacggaactaattcaataatctgcaaaaaaagccctaggtacatatatttgccttggctcgtatgacaaaaaaaggagcataaatgcttcaaaccttgataaactggaacgaaacagggtttccgttcagaggcttgcagtccgttccggtctggtcttgatcaggattgaaggtgtcgacctcttggccggcggggcaatcagccgcaccatagaaaacaagcatgccgtcagcatctagagccaaaagctggagtccagcaccgccgttgccgagaccattgtggcaatcttcgtcatcaccagagtaagggatagcctcgccggtacattgaccattctgatagactgcgatgcggtaatcatttccagctcgagtattcaaggcattggtgttgttgcgctgttcgacgttcggaatagacgctccttgcaccagggcggcgcttaggaagaagccgagggctaggttctggaatgatcccgagtacatcctggtttgcagatttgactgacgataaacggcactccaagagggtgacgctggttgatatgggcgtaagcggttctgagacgttgagaccactgatcggagttgtcgagatcgagactttggaaatcctcgatacgcacacgaaaatcgtgatttgaatcaggtactggggtcaagtacaagatgtcgtattctgtgtcgtttcgatgctcgaggatatcttgttggatacgatcaacaaaccggacgtcgagcgttccagcgatctgcctttgcattttgtgtgagacggaaattgaataaattgaatatgaagacaggtagtcgaaagattccgagagtagatgcaacggggatggggcaaccgtttaatgtttgatgctaggggcggtggtggcaaatgtgacgataaggcataattccaggaaacttacctacttgctcagagtatgattgaccttaatgaacatgaatgcgccaacaagaccatgaacattgacgctcttatacccgaacatgtcgttccttcgatggcagaccgactgcacagtcatacgctagtcagcatgaagattaaagcagacattgtacattcctgcttgaatgcccagcttgcaataggctgctaatccgaagcactagaccacagcgggacggtgttcaccggtacactcgttatgatcaggttataaacgacgtcgatgactgtgcatgataatgacatcataacaagttgttccacagcaaagctctcgatcattgcgtggtccgcaaattcccctctgtattcctgataacatcattctttgacggccttgagtcgaggacattggagttgcctagaagctattatcggttttactcaggggaccggtggggcaactcagcctcgtgccccgatgtaaagtctaaccaagctgagatgaccacccgggggaggagggggggcgcggcgggcgcggagagagcacggttcttggcccgtgactggaccccgtaatggaactgcgcagtacggttggcgtaataacgtaattggccaactttcataggcttgagcgagcctttcatgccaaatctagttagtcaactggagagacttcctatgtagcggaaatcctctgctgagtgggtctgatcagggcggatcatggtttctctttcccagagcataggatactgcacgtgatctggtgacagatctgtcggttggctctcggtggcccactgtgttcccggtgggtcgccatcgattggtgacgggtaggtccgtaataaccagctcaacggttggcggtccaatattgattttaacgaccgctattcaccccgttttactgtcggcatttgccgtagacctataatactaggttggatttaatcttatcgatgcctagaggttggtggtcctaagctgcccggatcccgggcagcccgggatccgggtcaacgcgctgacctcccacgagccccgactcatcgtaccaatcatcatcggagcagcccgcatgtttcaacctttcaagtaagagaattgtaactacttataatggattttagcaacttggagcatattgctgtccgtgcgttgctctaagaataacccgtaaaggtaccgggctccctcttcgttttccgtcttcgaaattgcttgatgttctactatgccacctaagagtctacaactttattgacacttatttggtcacggaactcaaggacctggcatttaagaagttcacagcggttgtgataaacttaggaaagccaaaaaatctggataagcagctcgcggttattgattgtttatcgttagcatttccgaagtcgtccctccacgataagcttcctagatagctaggtcagtacgctgcttagcgcctagacaatttacgtctttagaccaagtttcataaattgcttcaggtatttctatcactaagctatcgtataatagacactttgaacccagctaataaggctccttagaatatcaaatgccctaaatactatatccctcctacgatactcgcacttgttttaaggggaaccactactaagataagggaaagagggagagtagaggagggcattacaacccttattatttcccgcgttttcttttatctactttttggactagcccgaatagctctaggatatatatataatgatttggtgaatacacagaagccgctataagtaacttaactcgtctaccgtatttataccttatagcaaatcctttatcttccatttatccctacctagctatcatccgatattagatagcttgattaccctatctactctcaccaaggagaaaactcgttccgtctcgagcgctttataaggctcggatctataaaataaatgacttcacggtatctaggtttctagagcggagtttaaccatagtgtagagcagtgcttaatacaatatagacgactcgatactataagtctgcccaccaattgcggtttttatatcagctgttagatatccaggactgactagagcgtgtagaatccacgctggctggaaagcctcgtcgaaaccgtacgtaagatctgcgtcttcgccgtctgacttatcgacttggaggaactgtttggccttttccaaaagtaaagacactactttctgtcccagcctttccgacgtagttcaagcgctgtaacatgaagcttttcaactaggaaagagggccatgatcaagctcgttcccccatacagtagttcctctctgcactggatggtccttgtacttggccttgactgctcccgatcgatcaaagatatggaaggccacatcgcacgtttcctcgttgggctcttccatcctttcccagaattcagagcgtatatcctctcgataaatataccgggctagagcgttggcgacagtgataccatcgcaagtgcatttagcgacaaagttttttatccacttgaaatcgtccattccctcatctgtcaaaaagagccgaatctttagagttcgtgccttattaccggagatggtgtactcgtgctcttcaatgtcctgttcacgatccaaacattcgctctcatcttcgctccaccattcttcttcctcggagttatcgaatccatggtactcaagagtcatcttctgtcaattcatcgtatctggtttctatccctgattgtcaaagcaatatcagtatagctcacatctcttatgtgttagtgggatgggaaggtgagcgcactgagggatcctcggtccctttccattttctccccagtattttccattcttcttatcaaccttggtccctggcctaattttggggcgagatttatgaggtaggagaagaaaggcaggcgggcggcgagacaaaaagtgggatcagccaacaagggagggaatcttctacagttgtacttagtaacgcggtcgtaaaaggtgacttgaccatggattccaaactcatgtcgaaagacttcatcatctcgcaacgccttgataaccatttcaacaaaattatccaccgtgtctcgctcaaaatttcgaagggacgcttccgaataaatcggcctgttctggatattcgtaacgacataatctatttgggtatcagaagggaagagggggcgcgaggtaaaggcagccgtgcggtcgaatttcctccagacttgctcctggagctgagggaaatcaagccaatggactatgcgcttggggtaaagtctgttcactgggtcggtcgcatcgccctgagtcgtgacggtcgcatccgtctcaactcggatcgcttgagatagagtgtttggttggagtcgccgttcagcctctccctggaggcgctctgcttcttctcgcgcctttctctcttttcctagcgcctgtctctcctcctcaagttgacgtcgtagctccgcgattgtttcttccatcgcttgttgaaatcactatacagcagataatcgactgatgcaaatggaagtcaatatagtaggggttcgctgtctggcggcggggagtggcccgtcagggcggaatgcgtccagatgtttaccagcttactcacccccttggctcgagtcgattcatgcctcaggcacggatgacatcaacatgcttttggtctttcggtaggctgacgctcagaggtccttttgtttcgtcgtatagagtactagtgaaagttctcccgtctcgtccgagggctcggaatggagaggaggtggttcttgcaggttgaaatcatttcttgccagagactgggggtgcgagggtattatggaatgcacggatctgcgctttaggtggggaaggggctctcaactagccaatttttttagtcctgctcggatatgggcttcgtccccactactacggaggtgaacccgatcgctagaacctcggctccatcttcacctagcaccattcggaagcccaacagtcagcggccaacaacgaccgccacccagcttaataacgcgcggaaggtcagacaatcacccattattcgggcgcagcgcaaacgcagcactttggctaccatttcggaggaattctacaatagccttacccaggggatcaactccacaaagccgcaaaatcaggatatccgctccctctaggtcagcagcaataagggttctggctaggactcggtgtcccccgagccattatcagaaccgatgatgccccctcctactcttcctccccctcggatctctcctgtaattgctccccatgttaaagattcttcgcctagcactgcggccacccctgcgcttttgatacgcatacagcggaatcaacattcgcaagaccccgtaggccagttccgcggtcaagcacagctcgcggggcctgagtgcccagatggagtaatggaagatataccacttatagaggcggccgctcctttgcagctgcgtccgaaacccaaccgtatcgataccgctgtacggaatccgtcggtctctacaaatgggacacctttcttggatccttcgtctgcgacgtacgataaacctcccagtgcctctctagctcctagtccccgcacagatgcaataccgccttccagtgggccggttcctcgaaaatcagaatccagaactgcgtctaatcggaaacgagccagtatgagttccactcaggctagtccacagttacggcccaagattagtcccagcatccagccccttataaaaggcagcgatggtgagtcttgaatccgaattgaattccatggctgttgtactaactatatactagacatgtcataggatatgctttacctagcatcgaaatctaactatcaacacattctcaatggcactctgccatcgggcgtgagctgcccagaggccctagcagagaaatctgagctcaaagcggacgaatcacaagctcgcatagcagggacgccggaatcgaatcaacaatacgctcaagaaggttgagcttctcgttccgcaggagtttatcgatgaccgcaatgctaaggaagctgcagaagcctgtagaaaggtcaacgagaaggaaaaagagaaagaaaaggctaaccaggccatcagcaaggccacccctgtggagatagccattgattacatcaaggccccgaaaaaaaacttagacacaaccactgctaagttggctgccgtcgaggccaagttttcgggcgagccctctacggagagctcaacctcaacttccgcttaacctgaggagactccgaaaggtgtcgccaactctgaaacgaagagttcggcgtgatcggactatattaccttaataagaccagatcttctgcttgcccgcatagtgatgcaatctatgcaacggtggaagatcgaaaaacgggatattccctttccggggtggaggtttcgcgcaattgtgttatggatccatgatctaatggggttttctttctgtttatttttataacgtgatttgatagcgccggtgtttgaactacgagggtggctcatttttgcttgtactagttctatttttactatgtctacctacttgataaccactgccagttcttcaattttcctttcttatcttcatcttagatcgattttagatgcatgaccctagtatttgcttatcatcatgttccatttaagatcgtgcccatgaagtcaattgactgtatgcggaatcagaatcgggagtttgcgtctgctccgtactcaattaataacctgacaaaaggagctttttggttctgcaccgccagatgaataggcgtcaacccatctttatctgtcgaggagatcgtcctatccgccccgtttgacagcagcatattcccagactctacatgaccagcaagggcagcgtagtgtagtggagtctgaccatttctatcttgtgcttgcacatcagcgccgtgtttcagcagggtggaaatcagctttccgttatcaaggagcacggcttgatgaaggagggaactgccagaaagtgactgctttcgaaccgatagagagctttcaactagctctgttcgatcggtgcagttatctgaaggagaagccttaggtagtgttaatagttggtctagcaatttggtggattttaccctcactctctgatgtgtcttgtgcggaccatgaccggttaccgagaacggaagactatacccccacggggtgagctccgatcccatgtcgagctccaaaggaaagtatgcttcgttgtttggaggggatatatgaggttttgcgggtgtgactgtgacttccggaggaatgccgcacgggcttgggagcagatctctcgttgtgagaacatttgggccttcggcgtgagagccgccaacattcaagcttttactttgtttcgtgaccctgagcccttcttgtatgttggcattttgaagaagatattcatcttgtcgcaagcggtgtttgacggattctcctacggaaagacgaaatcgattagttatattttgatatgaataaacgcgtatgtgttaacagaactatacgatgcatagaagagtgacttaattttaggtattctcacggtagttccgctgtgatacgcaatttttcgcgcgccgttgctcttctgtgaggtcccgaaccgatgtgtgaggccctttagtaatttttccacgaggatgatgcatcgtgtttttcgctcagaattgtaaagctgctatggtaaaaactgacttataaaaccccaatgcgatgaatgcgctcgtggtaaaagaaaagggttgcatcctgttattcttctggggcggctgagcaaggtcttagcgaaaagcatgtgctagtcaagttgggagtagttgcttctttttctctagtgccattaatctgcgggaaaatatagatcccctcagagaataaaaagggctaagctgggatttgggttacattgcagggattgagccgtcttgattgctgaaacagtgcccctctactccaacttgagccggacattttcaagacaggtccacaagctgccagttataagatggttattcaagcatcttttagacagtaagtaaacagataagatcgtgttgtctcgaacaaaggtaattcgtagaagactagttgcttggccatcattacacggtttgtgtggcaagtatcataccatattggtcgggtctcacccctggtggataaaattcagtttggctcggggggcgaaaaaggtaccaagagcggataccaatatagttaaggcatgtactttggctccgaggggacaatcaagtgtgcttccgagtggacttgcatcgaccagaatttgtgagaattcgcatgcctgttctgtcatgtcctattgcgataggctcttggtgcctaggctcctatccctccttaaggactcatcgcgttgggtgaatgtaactaaaggtgtcaataaagtgagtactgtactgggtgatgctccaataacacccgctcctggagaatctagcaagggagccacagcaacgaggcgtcagcggccagaatcatacacgtacaattccactaatcaccaaattccccgccttgacccgccgggaaagcgatagccacttgttcccctcatcattgctcggtcatttgcgccgggaagatgatcgttgccgataatgtgcctaggtataaatagtataaatagtataaatggtataacctaccctaacagacaaagattcaggagcagcactggatccgttctggtgataatcgaacaaagggagcctctactagagtgataaccgtgatgcattcgtccaggttcccagaccttccggggtctggatacccacagatgtcgaccttagcgagggagatccctatccaattgtccaagaaagaccaacaacgagaacgcaatcgacaagcacagcgtaagcatcgtgagttcttcttcttttcgacttttcgtgaaagagacctcatcgagaatctctaggtgaatctgtcaagcagcagttggaaaagtttgatcggctacgacaatgtctccaagacctagatagtggccctaaagcctcgaaggatctggcaaacctaccgttagatgaacagcaaaattgcccgtcgccatcggctggtgaaaattcctctatacccgttcaatcgatattaccaagcgtcttaccggaagtcgatgagcccataaactcacagtgcagagacccaattaatatactcactcgcccattcattgcctcaactggatataccaatggattgtgcagtcaactatcaaaatcacacgatggagactcttcgctagcgagctctcgagtcgaggagcactatttaatggtaagcccccttcccttctccctcttttcccacaacttctgatttcactagaaggctgatttgatttaaaaaaaggctttccctccaccagatacatcgttttcgctggacccaaaccactgccctccgctagagttagaatcgaacaccagggcatgcaattggcgggctcccggtcggactttgttgcaccagggcgtgtttatggatagcgaagacatagttttggtgttgctggctcaggttgcagatgtggaagctcgggaccatgacggacggacacctcttcacctggctgccgctctaggacacgcaaggatagggcgtttgttgctcatgcatggtgctgcggcgacgctgtccctggaggatagacatggactgaccgccatgcatcttgcggttcagaacggccatgcgccgatagttgaggatttggtagagttcggcgctgatgtcaatttgcaattctaagtagatggtagtgtgagggattcggagtgggaagttcaaaaacagtcgaagttgaatgataatttagcatcgagcgacaatcaggtttctttccatcttgcctctgatgtatcgcccggtcacaaattcctatttccgcagataaactcaagttgctcactatgactcggacgaaagaacttgttgacttgtctcaatatatgtatttctcgctccatatttggatctagttatgtagctgcgcagtcaaggctggtagagtataacaggattcttggggatcagctatccacaatgcattatcgcggttgcttgcctgggttcaggtagatgcagacttaaggagttcttgtaccatgtgtatgtaggttgtattattgatggagttatgtgggtcacgacccagtattacatatagatacaggtctaaccctaatgcatgagtagtgcgtatcagggtgacaggacaataccatcggtacaggggatccaacaggagtctagttataatcgcggattggaagaacgttgatccagtacttcacaacaccgagaatccccttggcattggcacccaccaccttcacatatttggctttgcctttgagaccatcaatacgagcgccctggtagtgaaaacaaaagacattattgattgaaagaaagagggggcgaacagataagcgcatgagttgcataacatcaagaaatgtctccggtttcaaatatacaagtcttgtccctgctaataccgtgacaggcattctcggcgtcggaacggaaagcttgcttcctgtgagccttgccgcaaagataaagtgcggtgcgaccatgcccagcctgtgtgtaaacgttgccagaaacggggattcaccggtcggtgtttctaccatcctgcaccgttgaccagcaccagaagacaaccagatagggatggtcaaattcacttgtatgtccgcaattgcccgcagtaggaatatcaactgagcgcaaaaaaatttataggtcaccttcgccttccttgggaaacctgggcaaccccatgtctgactctgaaacgcttgacgctgtggcaccatgcccgtctgttatccagccagcacttcgaactgaacagatgctgccagcagggtacttgggtccgacaagcttcatcgcggggcttgaggagagcgttgatctttttacccatggtgaacaatccaatacagatggacgagagaattcagccatagctccatctcccgcgttagtcaagaggaccgcagaggttcttcgctgcttgcaacatttccctgctattaaaaacctggtccataaatactacagcgtctctcaaaccgctgtcatcccgtcaccatttatcctcaacgcgctggacgagctggaggtcactgttaacggaagcttgtttgggtcagcgtccgatgaacgactgtttacattcagcacattcgtaacacacaatactagcaaggccttgcagatcccacagaatagcgacgggacagtgtttcacaaatattttactggaccttttcttcgcttggagatcattggagttatatgcgctctagcaggccgggccagctacttcgggctagccgacagtacggttggcgataccgagtcaccaacccaattctctcgcaaaatgttggttatatgtgatctcactatacatatatgcaagagtctaacggctttgaatgatctttctctctggcttgtccacgaaaacctcctcttgtcgaagctgcttcggggtgattctagtcagtcatatttactaaccctacacgaatcccaccgctgacgagatgttctacaggttcagtgacatggaaccgcctaggtgaacttgccacgggtatatttgagtttggtgcgcatagggacacccctagcttagtaccgcttttcattcttgaatcccgacggcggctctttgcagcttcctatcagctcgataaaagtattgcgactttccttggacgaccgcctcgcatttcatggaggcactctgattgccttcttcctcttgatatcagcgatgaggatttagctggtcacccccatacactggaggctgcccggcgctctttagatgctaatggatggaatataaaaaaagtctatcagccagcatcttggatacgactacgatttattatcagtacattccgagaagagattctggagctgtcccttcaaaagttaagtccgaatagaacggaaaaattgcggtaggttgaagtcgatgtctgcctggagtcatttttgtctacttgatgctgattattagtactagtgaggtttccagtcgctgccaccaggcttggggtttgttacctgaacatctccaatatacctctagttgttgggagtccgaccttcctataggagtgaagttgatatcgatcatttcttatatcgcctatctttacaatgagttctcaatccagagcctattgtaccaggattctaaaagaacggattctgcgctactagacgtcagctctgaaatcctctccactatattgaccctgggccgacagtgggagcgatctgttgacatcaagggtgacttcacttggatcgtgagtagattttggctacctaatggatctcaacttatcttcttttttaggctcttgtttatgggttttcatgcgccggggttttgatccgagcaatgcaggagcaagctcgaacgggccagccattattgtattctggatctcgatcctccctcattcgcaacctaagcgtctttatctcgcacctagagtccatggccggtccggaacaggcgacatctccattgttcatccgtgcaacgtcggtcttctcgagtattatcgatggaatattggagccgagacgagaagttcccgtcaacagtactaaccccgatactatattgaattctgatattgaaacgcccttcctttttgatcttcaggggatggacttgtttgagactcaagattttcgagttgcctttgatgatatgctttactaaagaaggctgtgagctcctagcaacccatttagagacttttgcaatttcctacaaacagccactttgctctcaaattcattatgttttcttcgcagagtcttcagcgagatgcccttcgcttcactctgacactgtcaggtgatgattaggaccaggagttataaataaactatatataactgtaacctcaacaatttctttattaattctttcatcaatttatctactttgttaccatgccaggcaccataccaagcgatagaaggcaccgagtcccttagacgtggacgtaggaagacgctaccgaaatttcatataggagggatcgatgtagcacaaccctgtaaaactacatatgtacgcagggagagggagagagaacgctgacagaaattggtcaagtcttcttcctaatcaatcttgcactcgaaatcgtccttgacctggtcgcatatgctcaacgtctctgcacgacttgtaagtgagtacactgtgaacgcggcaagccatggcgttgtgctgagctgtgggtcttcgataatgtcgccttttccgaaattcatgataggatccatcacacgggacatgagggttggacttctttccgcaaggtctttccacggatcatcagaggcaaccacaccggacttttctgcttgaatggctgatatcgcgacatgacgacgagcctgatgaggttgcgacaaggcgcgaagcctatattcgtccctaagtgcgatcagaatgtgaagtgcgaacaaatcgaccccatttgtataagcagtagcacatgtgtctacatagcctggcggtctggcgttaatctcaatgagaaacacgctggcatcatgggcggggtggatagggttgggacgcaaatccaggggttccccgtcgcctcctggctggtattgatgactggaattccgcacccgagcctccacgtggaaaacgccggagcggaatccaaggcgcaatatagcttgatgtagagccttctgaagagtagcaacttctgacggtggaagagtagaggggaacacatttagggtctctttgaagttgtcggaatctgcgttaccttcactcgactcagcggtgcaaggaaaattatcgatcacctcaaaaaatatgatctcgccgcgcaataagacaaaattgcagtctacctctggcccgtcgcaatactcttcaatcagaacatcggtctgccatccagagtcttttgagatttccccggttctggaaaatgcggtctgccttgacactttccccacggcttcgatcagtccctgcaaggtagtaaccttatggacgcccagactatgccagccaaagcagggtttgacaatccacggcgggccgggaggaagcgcatttctctcgtttgatgttatttgtgagatgaggccatcgaggctagagaccaaacggcatgagtctggactgagttccgaacgcgtgttgtgcttattgacagatttggcaaaagactcagatggagatgttggcagaccgaggcactctgctgcttgagcgaccggaatgagcaggaattcagtcactgtggtcaatccatggatggggcggttgtagccttggatggcgttactgatgcgacgcgaaagtccgtcgtccgccgtcatgtcgatttcaataaaagcttctctgggggctagctttacagctcctccttttcccagccaatgtccgcgtggccctatagccacaaccttcactccgagggcatgagccgccttgaagaatcgccaagaagcatttatctgacgcacttcgccaaccacggccagtctgcgcatgttgatagactttggggaagtccattgaagtgacagttgctcgatcagctgtgattggatggtattctccagttgggtatatgagtccccatcatcatcgatcaagatacaacacacggctgctctcaggagttgcgagagaccttgttgagggaattgaggccaatggacaaactccatgggttcgaccagccctactaccttatgtattcctgagcagccacggagtcgttcctcaaaaatatcatttcgaatcatgtaccctgcttcattgggtatgatgaatttgagcaatttctgctcgctttgaacatgcgataaaaagcttgagtcggtattcatgcatgcaaatatcgaatcaagcttcgtacgcttcatggcaattgtgatgggaacggagttagtgctcatcactagtagcgactttgctcctgagaccacgacttggcatttttcaatgagctctggaggggcaggctggacaagggcagtaagaatgctgcattttgtaccgctctcgttttgcatatgctgaaagcctatagttgtgatcgtcatgtagactaggaattgttagttatacaggacgaaacaaaaggcgaaaagtacactaccatcccgcacgcgatcaaaaagaatacagaaatccgaagacattgtggttattcccttggacgtgttttttttttcaaataattattcatcttctgcatcaagggcttttgaagttttgttctctgggatctatcaacacccaatgtgacgtcgccacgatatccgaactccgagtttgattccgatcacattttcagcaaatcccaaggtactgtcaggttatgtcatgtcatataatgactgtgcattaataaagtccctgtgccccataattcatttcgtcgttttcttcatgagcgaaaaaccccgtcattgatgaaaaacagagaagctcagtccgtatctatgtcttcaccaactctgcagggtcgcatagccacagaagacgaaattcgcgatttacagcatgtcccagcgcatcttcctaagcgagtctggttggcggcgactattggaatggcggagcggtttgcttattatggaacacagaccctcttccgtcagtatacaactctcaattacctttgatctctctgttaaccaggataaacagaaaactatctccagaacaagccaaccgacttggtacctggggcgatgggactgggaaagtctacagcaaccactgtgaatttagcgttcactgtgttggtaaacatcctaccattgccgacatccgttcttgtagatggagtgttaggccgatatcgatctcttcaaatatttacgtggttagttgatattcttctgctttgcgctctcacccattttaactgactgatcaatgtctcttgtacacctgcagcatctacgcagttggatccacagtcctttttgcgacctcctttccttcggaaatgaagacaggtatctcgactcccggatttgtggttggggcgattctcattgctctcggcctcggaggggtacaagcatccatccagcctttcatcggtatgagctagaaagcagaagcagagtgccttggctgattgacttgcagcggatcaatacaccgaatcagatatgcgaatcagaacaaacaaacaagggcaaaaagtggtggaagatcgcgaactcaccatccaatacatctacaatgtatattactggtaggtaggaaggagagacatatgaaggggtttagctaatggacttcgccggtaggatggtcaatgtcggttcattaggtagtgtcgccactacgttgatggagaaatatattggcttttggtcagcttacttgctggatctttgtgccgtggctatttgcgtgttggtggtccaagtggcgaggccaaaatttggtgcgtttggtggtctatgtcgcaaacgctgacatgtatctaatcgctttcaccaactagtacacccgcctatccaaggctcaaagcttccccttgctgctcgctgcctatggtgcgcagcgaaaggaggattcaaactcgatgccgctctcccggagaaacaattggaggtgcacggccgagtcgttccctgggatgaagagttcatcgcggagcttcggggtgctttgtcggccttcaaaatctggtgagtggtactgagttacaatttggcggtctatgtcggtctactgacatgagtagcattggttggccaattttctgggtttgcatgggcgaggggtcccaggtatcaatctctcaagcgggtcaaatggagacgcacgggatccccaacgatctcatcaaatctgccaacccggtagcctacgtcttatttggagttatagttcagaagcaactatatccgttcttgcagaaacgcaagattgtcttcagcccggtcaatcgcatcacgcttgggtttgccattatggcaattgccatggcatactcggccgttgtccagaatgcgatataccaggccggtccgtgttactcacgtcctcttgcgtgcgacgcatctcagggagggcaaattccaaatcatgtccatgtgctcctacagcttcccacctttgtgataatcgctattgccgaggtattctgctggccaaccggctctgagtatacttattcgcacgcccctaagagcatgaagtcaatattgcaagcgtgctatatcggaacggcaggattaggatatctcttaggcatggcgttgtccccactcgccaaggatcctctgctagtcgtgttgtggtctttggtcgctggaatgatgttcctgacggcctgtgcatttcgtgttgccttccgcaaatattagatgacaatcaggatttggagtcgacagaacggcagcaatagcaagtgcagccaaaaggcatggaaaacatagcatttggttctagcttctgtggatgatagaccctttgggaagcagtcttattagagatagaacatatgtggcaagcttggtcctggcacggtgatggttgagcttggttcagagtgggatgaacagttggcacatgtattgaaccccattttgctgcagtttttgattgcgggcagtctaaataatgaccgacgtgtgtgatattatttttcatctaattaaacggaagcctgaagtaaagatatgcaatctacacctaattcctagactccaggagcagatcctgctctggaggtcgtggatcatccgctgagcgtacttggtggtgcaaccaatagtgctgatagatgaagaccatatcaaaagggatggtcgcattaccaagatcgaaagacccgccgtagactgccggcgataattcattactgcctacggggtgtgcttggtcgttgccagctgtaggcctacattgaatgactcggcgaaagtccaatcagtatatgagaaagtgataggatgcatgtacttgctcaccacgtcaatccattctcgtcaaggtcctataggaataaaaatctggcaacatccgaggcgagcacggcaagataactcccggattctaccaaggtcaatcgacttgcccgttgcgatttagatttgaagttctaaagccacacctatataataggtgactggagatcaagcagcagatcaatgacccatgaaggacgtagacgaaatcgttcgattgaacagccagtatgggctctaggaattacgatacgcgtactatgctcaaacggtactgggcaaaagaagcagccattgaatcccgtatatgcggttagaccggaaaggcattaagctggacgaagacgaatgagaagccgtcggttgaccgtcggcgatggttgtggatcacttgcgggtagaagaaaaaaggccatagtatgagaaagggcatgcaacctgctgacagccatgtctcggaaattgacataagagaaaagtacatttgaacttgtagggagtcaacgtttcggaataaacacggggttcggagtccggagttcggaactcgtcaaacttggtatgcttagctacgtaggtacctaggtataaccaataacggacttaataaaaagccatcagtcacgagtggataatcaagtgactagtgactacatgcgtctcagagagatctacgataagacaaatttggccaaggctgcacagtcatttggccattataaaattggtagcttatttggcgcttacctacagaatcatatatcataacttcttcgagttctttgagaagagaatttacgcccatcaaacctttcctggcgcctcaaacttacttgcacttagcagcagactcgaataagatcattttcatcatgctagaaaagccagcattgcagcgattcgaaactttacaacttcacgctgggtacgacactcaggccactagttccaaaactagcttactgatgcgttgaaatatagagcgtttcccgatgctttgaatagctgctcagttcctatttacacgacggcagcatttggattcaacaatgccgagcatggcgtgcgtctcttgaatgttagcgaattcggcaatatctacagccgtattaccaatgtaagaaaatatcaccttcctctacctttaaatcgcagtatcagtctaagccctacctcttatttcagccaactgttagcgttttccaaaatcgcatggcagctcttgaaggtggcgtcgctgcttgtgcagtcgcatcaggctcagccgccgtgtcgatgacactgatggcactggcagggattggtgacaacattgttgcctctttccatgtccatggtggcacattgcatcaattcaaagtgctggctccacaattaggtattgagtctcgatttgtcacctcaaatgacccggaagactttcgatccaagatagatgagaagactaagttcattttcgtggagagcattagcaatccgaaatatgttgttccggatctcgaagcactcgcgaaaattgcccactcaaagggaattcctctcattgtcagtatcctcctattaccctcttcgcaaactcgcaccagactaaacgagattccaggtcgataatacatttgggtgtgccggttacttctgccgaccaattgatcacggagcagacattgtgctccattcggcaaccaaatggatctgtggtcatggtacaaccctcggtggagttatcatcgatgcagggacatttgactggggcgctcaagacgacaaattcccgcagttccatgtgaatggtgccgaagagggcagtggcgaactaagtttgtggaatatgtttggctcacgcgcctttgccatccgttgccagttcgaggttctgcgtgacatcggtagttcaatgagccctcaggctgctcagcagcttattatcgggttggaatctctggcggtccggtgtgaccggcacaccagcaataccagggctctagctacttggctcgagcaacagccgtcggttgcttgggtccgatatctggggaatgaggaccatccgagccacaaaaatgcagaaaggtaccttcaccgtgggtatggcggggtcttttcatttggaatcaagggtggcaagcaagccggattcaaattgtgtgatgggcttaagctgatcattaacaccgccaagtatgttccatctgtaaatcccccatctaaggaggctttagctgacaaatatgtacttgatagccttggagactcaaagaccctcgtggtgcatccctggacgactactcatcaacagcttactgatgccgagagacttgatgcgggggtggatgaagaccatatgcgtctttctgtgggcatagagcatattgatgatctgaaagatgacttctgccaagcttttgcgtcgatgaatgagactacaaaggcctctgccaattcagttaaacagaattctcacattgaagagcagaagcgaatggtccggactttatttgggtcccgcgatcctttgcccctttccgtacccagctagatgatagaatggatatttttgaccgaccatggtctgttggatttctcctactttgtagactcaaagcatccgctaaattcaatactctactgttgggattgaggtcatatgaagagaccagggtggagactcaggcaagcacatggtatatagtatgtgagccaattttcctaattaggactgattttacagcattggtgaccaattgtttcatccagcaaatcctccaatagctcgattggtacccaatatcagtagaggttcgttgtggagaaatcccagaggtgctgccggggtttctacactgagcgcacgagtattttatttttatttttatttccatgcttaatgcggcctacacaaattctttgatattgtcaaatacgacgtctgcgctcgaaataacggcaactaacgattttgccctttccttcacatccagggagccagtcgtcgaagcaaatctcatcatgcccgctaccgctaatgccccatttagatcaacaatgcctcgtgtctcttggaacgtatctctgatagcactttgaatctcacatgctttcaccatgatcacatggtccactacatgcggattgactcgtgaaatctccgttgtcaacgttctgtcgaggtgatcgtggctgatgacaggtagattgtcctgtcctgttttcaaagcgtttgggatatgtgtattacattccgcattcggtaaatcaatcggaaacccgtagagcttcgagagctccactgaaggtagaacgtcgacgccgataaccttcacatgtggtgcaaattgtttgactgatagaccaattgcttcgagggcacctcctgctcgggcgctgcagaatatcccttccagctgttggtcgtccttgacttgtctgagaatctctaacgccactgttcctagcccggccagcgtgtaggggtcattcaggggatcgatgtagagagcctgcacgttgaacgcggcggagagtggacctgatggctcatcggaaaggtgttccacgacagatcccatttgttgtagctcgtgcacttcatttgggcacatttctggaccaactaaaataactgctggaatattaaggagacgcgcagaatacgcgattgcacgagcatattgtcctggaagagtccaattggttaggtttaagtcatgcaaagtagcatagatcttcacctttggaaggaatgacaacgcccctccatcgattctcaggtgtgatgtgactcatagagttgtataggccgcgtacatgcgggctgaaacttaattgctgatcctcgcgtttgaggtagagctggaagtccacatgccgactgaggttgtgtgctgggcttaaatctgtgcttctaatcatgtcatgtaccctagacatgactattaattgagcatactatatgtttcattaacatctaagctatagttctggactggcatacatacatctggatttgaacaacacgcgttgtggacttgcgatttctgtagcatggtcgagagcaagacttcacccgggtcaagaagacctcaagtcaagactgagagcgtgacaacaattctttttttaaaaaataaaagaaataaaaaataaaacgagagcatgtaagaagcaatattcccaaactaaattagtcgcgagtatcgaagtgatcctcaagtcaataatggaattagggtccaatacaatcaattattgaagccagtgtaagctagaaaagtccagctagtccgggaaacaggggcgtctcagccgtacttactgtactgcccaatgcccctcggactagctcgatattaactgcacagtcaggtgtggacccattgaatttagatgaaacataacacgtgaagacttggctaattgcaatatgtgcgattttctattgctactccgtacagtacgatattcttcctacctcatgatagctgccggatagcaagtccatacgacaagagatttcagggctattatgtgcagcgggtctcgaggcaaaccctcataatgggatatgcaatgtcacgtcggaacgtgatctttacgtttataaggcgcttttatgtatattaggttaaataaaatatccgctattatacgtggcccatatgctcaattgcaacttcaagaggtggctgtgtagcatcaggattgtttgtggttgcactggcctctttcctcggactgcccgaatgccaggcctcgcgaaggtacgaagatattcctatgccgggtcagatggcgcttttgaaaaatcttgttgacctaccgaggagttttgtgagagcctttacactcctatgggtatcttgcgctcccacacacttgaaggctgcatctggagacacctcttcgtggcgctagagataagtactcgataatcgacttatgattattaaggattctaagaggtgcataaaatctgtttactgccttctctcatggcctgcatgcgcacctcggactctccgtatagaagccgaacggcgtagcttgttcctcttcgctgtttgcgtctattgactgggtggtgatataatcatacatcaaggaaagctgtccagattccatatcaaactttgttgtacacataaacaacacaagatcctggcccctcatttacctgatattctaactagcacttagaaaatccctcatcataactaaatgaaacctaataggtcttcctaggagctctcagaccctccatgccacgacaatatgattggtgagatgagtatagatcctaggagctcgagtgctggtgcccatttgcggggactgtggccgctaatgctgagagtcaaagtatataaaagaaacactgatccctcctagagtgaacgtatccaggtttcaagcattctcctcaagactgctgctcataagttcaagcaaccgtcggcattccgggtctgtcccctcagccagagcaaaagcctaacgagtatgcagatttttttaatgccgcaaagcaaaccgacaacctagtcgatatccaatgtatccatccgacgagagttgcaagaccgtttcctgcatactcctgagctctgagtttgttatatatggccatggcctaatgggaagatgtaagtgactctcactattgtaccagggggagcgcgaaaatttgcagggggcctgtggctgactgaatttagtagcataaatctactgaggttggagtgagaacagatcctagcttgatttctcggtctgattacacgtactaaaacctacttcaattgtacgtgctctttttgtcatttacctggacgcaaatggtgtgcttcctccgattgagccgaaccaacgatagccccttccacgcaggtgagtttgatccgcgacgcctgttcttctccaaatgtaggcatcgacatagaccaatgtccgtgagatacctgagccttccttcaaacatggtctaaattgatacttgtctacggtaaagtagtagtggttcagaaacccaaaaggctccaggttagtataaaaccccagaaagagagagcctgaagatattaagaaatcacatgaaaataaaacccgaacccccccccccccaaggcggcctctcccaaaccctcaacccaccgcctctgctattgagcatgtgtgtaccataatatggctatatattatcggtcacgtcatttcgcctgtatcatcccacctgaattataggcatctttttgctccctggccctaatttgtcggaccatgcttccatgcttcttcccgccatcgttgaacttgagagccttcatccacgagtcaagacatccgagaaaacaggaagagctcttctattggagcgaagactcgccatcttgattcgttaatgtattcaggcttgacatggcaatcaaaaggcccgctgccctctgcatcctagcttcatattgcagactcggaacctgttaagatactcgctagttgtcttattatattgcctatgtttgccaggtcgatactgttggtctacacatgtcaggttcagtaactgttgcagatttgagcctcgtacatatcaggacccaagccgcattatcgaaattatatctgcactacctataggaaggacgagctcgttaggtaccagctggacttcaccttgtaaccctcaaaatgaataaccgaccttcttcgaattactacaatgacggatatttctagaacagccaaatggcagatatatgggcaaggcgcgaaaatatacttccaggtactggattatttcggcaaagacgagaacgttggaaaatgtgaaaagtgcaatcacgacttgagattgggtagtctgaccatttcgcaatcgcttagtcaggctgttctgggttcgtactcggtacaattgctccttgattaccgacgtaagataattaccaaattcctgtacagcccgcacagccacctcttcgagacaaacaagccacagtacctgaaactcctgcaatacctgaaacaggtatggtcttgtatgataccgttatcgtacagtgctgttgcagataccattaggtgttttacgactcgaccgcgactctatcaaaattgttgaagcccaaaattttcttgccgatagtactactaattttggaacatataggttggatctacactatatatggatcaaagaagcagagggagagttatattaggagagatggagcgagctcccaaacaactaacgtattttccatgcgagctgcgcaccctacccaaaacgcgtccatgaattagaactctgttagcttaaccacccaccgtggcaccaattcgctcttgaattcaatagagaaagagggtaggaccttattagttattatcggttctgagagatgcagtatgcgctagtaccggaagaagccaatgaggccattgctcagtacttgagatgtgtatttctgtatagttctatctgcaaatttaaggggctcgtttaagctgattaagcagttgatgccttgggaatcagggagcagtggttgttgaatgaaatagactacactagtaagattcttctccactttgaccgacagttatccaggcttctaagagtcaagaaattagcgctattcgcgaagcagcacgccgttttaaagtgcttagttaaggaacaaactggaagccagagatgtcaggaaccgaaaagtcgcactaaaatgactcacaaaagctcacgatgcttaatgatgttttccgcacctccatcatgttaagtaagttaagtaataccctgagcccaaatacgtacagtgtctccagtcgttacagtacagcgattttcgaaaacagtttacccctcagacacacggtttgtttctcggctcgtacccgaaaactgcgctagtccatatatggctaattcaaaactaaccccagcttagctgtatcgcagtatttaatgtattgggattctgcgtcaaatgagtcgttgttaattaccgtacacgacaatggaatgttctaggaagacagtcgcaggcacaacggcaatctggcgacctggcctgatccatgcccactcgcttcttcctttttctccatagctgttactgtatcgtctacatcaacatacatgtcgaagactccgtagagtactaacttggtaggctaagttggttctcgtttatgctccccatagcacacgtttcctatcgcaactctcattcgtcattgggcttgttgggaaagccagtaccgctcactcatgctgacaggcctccaggctttaatcgtgtgtagatatggacggcagccctatcatgataattacatctctcagccccaagaatacgaaccatgggaacaggattcacaatattctccccctaccccgggatacttccgaagcccatatgctccatcttccaactgcagcccttccccatccaccccacccgagaatgatcgcagctccgcgaggcaacgacctagtacactgcctctgctacaagaatccgaatgggagccagaaaaagcctacgacgaggatccaccaaactgcatccattatttcatagaatggcgagtcacccttaacaagaagaccgttgttaaagacacggaagaagatcttgtattggccccaggcgcctactggaagttgttcctggaagaaaagctacagaccgtcctcctagagaaagtgccccgcgacaaaagggtcagagttgatgacacggcaatcatggtctcaaacagcgaccgttcccagcgtgatctgaacaagcgtttcaacaaaactgaaatagtttgggccccaattgagaaacaactcaggatgtggtcgagtcatttctgccgtggaaaaagactcacgctgagagtctgtttcaattacgtagaggactgcagttacccacccgctggacggaagggtgaaaagagagggaaatcctccgtcacgaagcggatgcttggcgatcgcgatgcccagctggatgctgaagaaagttcatgcggacagcaatctatttggcgccacgtttatgatctgatgaaatgtgactcagccgcatgccacttgggcccttattgctggctagacccgaagggaaagaagcattatcgacttcggacgcaaacgctcagacgtctggtcacctatgccgagaaaggtggtatcctggagacgcacagggacgtcccggatgaaatccgagatgagctctacatggaagaacagcagagggaagaaaaagataagcgcaaaggcagtaatattcttggcagtcaaatgtcacatttgccgatcaacattaatgttcacccccctggagtggccacaacggcttcagctgttgtgacagctgggcaaaaatccgtgagttcgttgaagatccctggtctcaaggacgtggccgtcaaagaatatggtgagtggcttgcatctaatgtatctgatgatactctgaaagctgcatttcgacaagcgtgtggtataaccctgtctgatggctttgagcttgagcacatctacaaagatcaaaatccggaatttttcgtcagcaaaggaatcaaacccggaattgctcggagtttcgtagaaaacattggggattgggtcgagaatgtgaaaaaagttctgcctgttctcgagttggtgtagacaagctgtgggagttgcctgctgttatttggtgtttttctttcccgctcagtttgtatgcaactctggaatatgaagcacaagtacgtcctttttttgttcgagataattttagtgtgaattttgttccggggtcaaattagcggtaggacaaagtgaagcgtggtaaaggcccccatcggatgctagcgatgtgacgttccgtgggcccgggaatcaccctgttttctcgcccaacgagtctgttcgtcaaaagctcgctttcttcccctttcatatgcctcaggccccgttctcgaagttctgaaaagaagtcaaaagcagcgtcgaacgtatcaggatatgcaagctgtgtgccagatgcttctcccataatgatgcattctgagccaacggcgttgtttgatgtggcactccgatcaaatattcgacgcacgggaatttgaaggaagtctcgagtctaggttgagcatgaactagccgcccttgcgattaactggtttcaggtgaacttacaagcttcatggtcgcgactccggacgcagttgtatagaacgctgggccagcatttggattgggtatacgagcaagcactctttttccatcattcatgatcaaacggaagaccttgttatatcctccttcggccagcttcgttatggagatgcagctctctgatcgaacggctttggccgcgaggctttgcagctcagcaaggtaaaaggccttatccctgtccctgagctgcttttctccatctcagaaccatcatccactggtacaacagaagaagtgctcgtgatcaggatttggttgtcatttggtcggagagactcgtgatcgtgcgaacgatgcgaaacggaagagtagtggtcgtagcttgaaaccgagatggtgctgaaaagaagacagacttccgtggttgaaaacaacaaggtgaacagtttctcaaatttggaagagctgaaagtgcacgacgtcccatgacaacgttcattgctacatagtgtccggttgagaacagtcccaaaatcattggcgccaagggctgggtgtagccgcctggacttcttggcgcttactaagtcacatcagccacagctactaattttaattttgaaacagcatgacgattacaaccgtatgtacagggatggatgcatgtgacggacatgaaagggactgcagtggtggtggaatggccttagcacatcatttatttgatgttggtcattatactgaccgctttgaacgttcagcaacaaattgcggggccaagatattgagtcaaaaatgttattcaccaccgacggctgatgatcaaagaccgaagacttcgaccatagtttcaatgttgtctttcgcacaaaagcttctacctcctacagtggggtcccacagtcggaaaccagtataatgtactgtttctacctcccacccatatggtcggaacagaattatactaccttctaaatgcatagaccgtccagcaaaggcaaattctaagtgatgtgtcccaaatctcacctagcgtgttattagggccgtaatacaccctgtcctatggaatgccactgtacctccacgtccctcggtttgcataaattgaatgaaactggtggcaaagaccgcattctcaaacatcaacatagtatcaaacaatatgttggcgcaagcacgcaagtaaatcaacagcagtgcatggcgcccagagatacagctccatggcgatgacaataatagaaaaacacacccaaacatattcacgaataagaacttcccaaccatttttcagatagcgataccagttctgcactttcatggttctaaaagcatccagtatgctaagacagcgtgtcccatttttggctcggcctccaaaactccggtcgaagggtacaacagtttgttcattctcgggtagcatcgatgccgcaactcttacatacatagctcctgttaaaatcgaagccgagtattccgacacaatcgggattgcatgaaagacgatattggcgcatgttgttagtggataaggtattctttcataagcctggttactcagcgcagcgaaaacaacgccgcggaagaaagccaaaagggttgttgcaagatagtgaacgcagttcggcaggactatatccagaaatgcaactggtagtatttcgagccattctcgccagccaggaattctctgccaaatcgtctgttttctgggttttgaaacgacggtgtgaacccaagcagcgtggaggttcgttagagaaagtcccaataacagccttgataagccaaggacagggaatgtggctccgtcttctgcagaaattggtttagatagagccatgatcacaactgtcaaaagcatatatatcatgaactcctcgaggccagtgaaaatgaaccaaaatcctctttcgttgtgcaagtgccgacgagcaaggcttcgttgattggtgacagcattggatgtagtcgagatagtaaaaatattgcccatgatcattatactgccgcatattaaaaagccagtcactatgttgtttggatcactatcgatgactccagcgagcgataggacgaataagccggcgaggccgagaaaaccaccacacagggtaggaaatagttctcggatggagttatgtctcaggctccagaggaactccctggcattctccgattcgtcccttgttgttctaccacttcggccggtaggtggatcctcgatttttccaactacaaacaaaccggtctcttgcgggttttcgtcctctatggaagttggggtttctaggatagccagggccgctatgacgcttccatctgtgtattcgaactgaaagaccatgctttattagtgtcacgctttccccaaaatgaacttagcaggatctgtcaggtctcaccataaagagaaaaagtaaactaaatagtgatgtcgcgaccacaatcgtgggcatctcggtctggaaatccgcgttggagaaccgcacgagacagaacagggcagactgccaccgtgccagggatcctagtggcatcaggccgaacgatcacgaatgagataaacacttgagggaacaggtcgtcgtctacagcctcgctgggaaggtagggatgctcgagttaaaagaggagatgaagactaccacagcccggatgtaagtggtaaatgtggaagaaaaaggtgtggaggggaaaaggagggtgtgggtcaagccacatcgctagatctcccacatcttacgtagacactctatggagatttacagtattttacaaagactcattgagcgctgagatctaatacgctaaaagacacgatacggtcaagcagggattgtttatagggtagcctattatggactagcttggtttcagatacgggccgaggcacaatccatgtgttgggaatctatttcccactttcactgtatccctgcccactctccagtccctaatacccccgcggccctaggtccaaggcattttttttatttttttattcaaccttctcaccgaagtaggtgtcctgcgactcggaaaaatagaatgatccacctccactagtctgtcaatagcacccataatccctaagcgcagccctgtcaacatcgagagttcatttatctatctctcattcctgcttaaaatggcgcgtatccctaatcgatctgcgacctacgaagaagttcgaatttacattgcgcagacccttatatccaagtataatgcaggccatgacttcgcagaagatactgcccgctcgtggcgattagggcggggttctgagctttatgatgcgaaattggaatattttcaagaggtatttgggatggatacgggtctctgtctattccaaagtgtctgtgaggatagagacaatgcttggaagcagtcagttattggagttatttgcttctgtaggttaccactgttcagccaatacgaattatattgatcgctatatgctagggatgactattgtgtccgctgcgttgctcttttggtttcatatcctaccattacttcgcggccaaacaggctgtaagtgacttgtaacagctggtatcctatattatcagtgtgctaataatctctttgcatagcaccttcccaattactcctttttggcttaaccagggcaatctatgcttatctaagccctaggcgcgatgactatatgctagtgagtggtttgtttagtgcctgtattgcgttagttgctgcaacgcgtggctagtgaatgcactggggatctcgagggacaccacaacgcatgttatctccgaatttacacaatacggaccgtgcaataggccagtatttttccacctacactaccgcttaaattagcgatcaagcccggacgtttctagggctagcatccgaggaagaatgcacagccatgcatgaaattaagaaggggcacatgtatcttgatagtaattaggacgagcgaaaccgaacatctggaccgttatagttgttaaagaaaacaaaagagtcgacagattagacagggagcgggattgcatcgaagcgccatgtgacctacatccctggactcacttgtgggtggatgggggttgtacacggtacaagacggattcttacagtgatataatcaagagcgttttgctactgttagccgataccatatcatctggactaggattgttgagaatgtaagcaaagtagattagaatgtttatacttcaggtcggaaattggttaaatctgattatggatatcgtagtatcacggacgaaatgcagccttgatggggagagagctatttagtgaggtctaacttggcattcaagagtgatagatgagtgaagaagcctcttcggggtaaataagatggaaggccactgacacactcatgtgcatggcattctcgtgtaaaaatcaaaggttgaggctctttcgcgccgtataaaatattatgcctattcttgtacattggcggctataccgtatgaagattggcatgaatcaagttggggttcggcaattaacctccaacagtgtggagttaaaactgatttcgaatatgactgtacaacagtgacttcggacaacaaaaatctaactttgctagatgcctatttccatcaaaccccttcgtgcattcaccgataggattccgtgggcgaaaatattcgaggaagccgagaatacgaccaaacggcagcgtctttacccatcccagagtcatgatcagaagaagaactacagattagacaaaggtgcaactctcagcaaaacccaacaggagattgttatctaagcgaataaaggtgccgcgaacgcagaggtgaaaagaagctcagaaggacagtcacaggattctggccaaatgggtcattgatccaaatgatgtggacgcagaaaaggcgtagaaggacttggacgctcaaggccaacaactgagaagtcactctgttcaggaagtctgttggctgtacaagggaatcagaagaaaggtagatgacgacgatgagacgggtttgaatatacgattgatcacttcatgttactgtattttgtcatatgaaggagaattctaacaatctaaatcctcaacgctaaggcctgcatgccgaaaatggcccctagcactgtctttctttgccccaacttgattaatacacctctcaaggaaagtgctgaaatctcggtcgggatcatctgcaaagtagctccaattacgttttatgaatcctttgagctcagagaaaaattcctcaattggattgagatccggcgagtatggaggcaaatagaccactttcacgccagcgtcggcacacatctgtgagattcgttcggagtaatgaaacgatgcattatccattaccaagacagacttcggctcgggccatctcccacaatgccgaaggagttcatcaataaagtcctcgaagacaatggcatccgttgacccacgaaagacgcgagagagcacaagaccgtcttgagcgtaggcgggcaatatttgatagcgctcgtcacgatgaaactgcgacacttgccgcggtgccacaccgagtggtgaccagcctgtccgtcgaaacgaaattcgcttgtcacatccagattcgtcaacataaacaaggtggtatgactcaaactcggagaggttatgaagatatatctcccgtaactcggcgttctgctccttcgctttctgacgagcagtctttctcgaccagccgttagatacgagggcccttctaatgctagaagttgttgctagcatctgtaattcatcccataggaagatagccatctcgtcgaggtacaggcccggtttttccagcagatgatcaaaaagcgcttccaacattagcggcgtgatacttcgtctccgtccgacgcgatttgggggggcatgaacgtttccaaagaggcgcaagtttctgcgtatatttttgattgtctgttcgctacactccgccgcgtcggccattcgataacgggtaagtgactggccttgtatcatatcactaatgaattgccgcttggacggggaaagcctcggtgccatattactagaactgctcgaatgttcaatgtgtgctgagctggatggatgtcaagggtatggaggggcattcaggttggaatgtattgggatttcatgtaatatacagtataataagtaataaagttgtttggaaacaaaggaatattctattattagatgattattaattactccttagatggaagtagttagcgtggttccgggtacgggccgagaaacaaagcgcctgtgtccgaggggtaaactgttttcgaaaatcgctgtacggtgtatatcgtttcgacgaggggtcagcgtaaatgaattacacacacacacacacacacacacacacacaaaattcattaacgcctggcggctaaaccgaaagggcaactatcactgatctatcaatacatgtcctagtgtacatgtgccttatctccttagaacccatacctggttcctttcagtatatgtcatcgcagctgtcaatatcgtagcgggtcctcgtgagttagtaattctgttagtggactgacttgaaggtgcttcttcaagttttcaacatcctatcctcggcagttgaagcgcgtctaccgtctctggcacaaggtggttggtgtgggttagtttgggggaggttgtcattgtgttggtcgacatggttaagcggcgtcaagtcggtccgtggcgattgcgaatcgtattgaggctcgcactgcttccaagttcggcgcccagttctggtcatccgaaggtgattttccgcccaggaagaaagacatgttgcctccgtgggtacaggtatattgcagcattttcgtccagtgcatagtccacttccgacatcaaaagaggaagtgttccacggtctctcttgcttgtccacatacacaggatgaggaagtgcggcaaacttcaataatatcgactgacatcggcaatgggggaatggctgtaaaggaacatgaagcaggcaatgtttttgcttctgtttcggcttcagagggattgaacgattttggcaaatcttaacaaccggcttttggttacagtaacttccatgttttatgtagctttccgttgccaagaatttcaccaaggttggaatatccccagaaaacatgattatgatgatataaaaaagtaatatacgtagctaggtgggcgaattaatgcgaaattgtctttattacctatctcagatgtttttgtggatgatcttggcgtcatagtaataaacagcggattttctagtcgcgcgtgtcaccttgtaattctcactttagcactttgtacttattgtttggaaaggcgcgatcaaataaaaaaccaagtgattattgtttctgctgctctcaggcgatattcaatacgtgaattgggagcaacgatactcgaatgtgcaggtacgttgggggcgtttcatcacacagggcaaatcatgtcacggggatgggggttagagtgcgatcttgattctaccaaaaagtggttaaacaggggggttaagaaggggggttaagcagagcggttaagaagaagggtggttaagaagagtggttaagaagagtggttaagaagagtggttaagaagagtggttaagaagagtggttaagaagagtggttaagaagagtgtgcagatctagcgcagccaaggataatataaatggcaagataaggcccctcatctagctctaacatatggtatcatccgcaacgtgggggcaaggggctcgatatgctgaactccgcatattccgaactccaggactattccggactccaggtctggtccgaaggtgggaatgcgcatcattcccccttcctccgacttgcgccgttttccctctctccggtcatagtagatgtcgaggaacaattctgtccatattgagccctcatgttaaacgacacatggacgcacacagtctcccaaatcctgggctggacttatttcatcctgtggtcgctgtctttctacccgcaagtcctgcacaatcaccgccgccgctcaatggacggcttctctgtcgactttgcggtgcttaacatcctcggtttgaccgcatacacaatttccaatgcctgcttcctcttttcgccggttgtgcgggcccagtatgcccaaaggcatccccagggcgccgaaccgaccgtccaatggaacgattttgtctacgccctccacggagccctggtctgttgcctgattggcagccacttcctctatgcgaggttctggaactttcagtccaagtcacaacgcgtgagtatcttggctttcgtggtcatttgggcctgcgtgggggtggtggccttggccattctgtacgtttgggtttcagcgtcgtgggaatggattgacgtggtaagaaagcatgcggcgatcaaatcactactagcccgatatgtgctgactctcatattcacataaggtttatgtggtcggcatgatcaaggttttcctaaccgccgtcaagtacactccccaggccgcaatgaactacttaaggcagtccacggcagggctttccattgtcgcgattctgcttgatctgacgggtgctgcgctgtcgttgatgcagctggtgctggactcttcgttgcaggcggactggtcgggtaccaccggaaatattgccaaactcctactgggaaacattaccgtcctattcgatctcatctttatcttccagcactttgtgttgtatcaggaacaaccggcggagaggaagctagggctatcagagcatgatccgctcctggatagtagtgacgagccatagatacacacaatcatatggtctgaatttctccctatgtctgcgacatgtatgaaccagcaatgatgcaacttgtattcgaggtccgttcccttatggagctgaaaaggttgggaagaacgaaacataataatccacctataaataaggcagtgcggaatgacctccagcccatgaccagacgctcgtgcatttcgactaatctatacagtgagcagcagcggtagcgaacttagtagtgagtaccacacgagtcgatgaaaagcttaagtgacactatagctccatgtatcacacgcgaagcgttattctgtactaccggacagtgtttgatatatatatatagtcaagcacaggcaggggaaaatatgttcttccctcatttatggtttgttccaacctcttcaaccaccgaactttcaatccagataccctcaaccaccgtatagacaaagcttcttcaaggatcaccacatcccaccacaggcaagccccggtaagcccatcatgtaagggtaggcccgatacctatggagcggtagcgcccatggcagtggagtccttccgccatttcacgggaaaaaaggaagacactaaaaccttcatcaggttaatctctgagcccatcgattagagagcctggaacagtctcgtttgataggtatgtatcgaagtctttgttgatctagtacttgcgaaatgcaacacgaaacgcacaggcagtaatgaacatcagcccggcaactactgatcacatcacgaccagcaaagagtctctcgcaaggggtgatagtgccatgcctaacaagtaaccgagccctgctgtcccgatataacacgcctgcaagatcgacttcatgctttttgaggcgtgggaataggtatactcagagcccgtgggccagcagaacacttccgctagtgcaatgatgatgaaggtgggggagctgccacagcacatgggtgcggtttgggacctgtccgctgtctgaggccccgcacgcaagggggtgcgagtagcagggacccgtacgatagataaaagcctgcaccacggccgagtacgccatggctacggacatgatgacaaagcctagtggaatccggtccactgcgtggaaggcaattctgcgcttctgcaagaatggatacagctgtttctggacgatgggtccgaaaatcacataggctatcgggttcgcggatttgatcagatcgttagggattccgtgggtttccacttgccccgcctgcgagatggatacctgggctccttctcccatacaaacccagaagattggccatccaatgctattggggttagacgagctctacatttcgcaacgcggattccggtggttgggtaggggaaagtagtcaacgcaccagattttaaaagctgacagggcatcccgcagctctgcaataactccttgtcccagcggaccactcgtccatgcgtctcttgttgatattggggcagagcggcgttgagcttgaatccccctcggacagcataccacaagcatcgagcagcacgaggcagcttagagccttggacgggcggatggactggcccaaacatcattaaacctattgacacagctctatgagaaagatttgcaagacgcaccgaatctggatttcgctacctggacgataaacacgcaaaggatgaccgcacagagatccagcagataagccgacgagaacccgatgtgtttttccatcagcgtggtggcgatgctgcccaaggagccgacattgggcatcctagccggccaccgtcattacctgaagtctccccgtctctgcataatgcacatggttacctaccagtagtaaagattatagatatactggattgtgagttcacggtcttccacaacccgttcgccccgattggtgactctgattcacatctcatgctccgtgtactgatccgctgttgtctgatcagcctcaaggtacgtcctccatatagttgcgcataccgatgaatggctgaacggaagcttgaacccctccaagaccgatagcaatgagtaggcacccacgacaatcttcatcctgagattgcaagtatgccaaggcctacgcgcccagggagtagatatttagtaaagacaacataagtcagctgcgagtagaaataaaagtcagcggcgcgagcctagagatgaagggttgactctagtgagaccaaaatgtcatccggccaaccccaggtacagctcagcgtttccgtcgaccacaaagtctacagcccattatttcggcatctgtcgaagcacttcaaccctcattaagaaatggtaaccgtggttaaaatggggacatgtagaatgtaagcgcgttaagcgatttaattgcaaattcgatgatatgtacgaaccatacgtttgcggcgttgctttcttttcaacagttgatgaaagtggttcaccatactcaacgcacaattttaagaggaagtaggccaggtcgagacttgagtctataggccacaaagtctccaaacaccccttcaacgtcgttgaaattacttcaacgcttattaacgagaccgtgactctcactaccaactgcgcaactggttccttggtagagacgtagccgaaaaatataaaaggagcccgattcccagcccaaaaaaattcaggacttcggtcctcacactccggtatgtcatagtatccctctcttgcctgcgggcttgagagtctccgtgaccacggctgtcgctgccacaagcccagtgatgtaagacttgcgctccctcgctgccacgagccccgcgagtgtaaaaaggtgcttcgcaggataggtctgcgtgaacaacaatcctcgcaggggggcgctgcgttaccaagtgaactccgcagggggacgctgtgatgacaagttctccgcagcctaggctctgcgtcaacaactgtgtctcgcaggataggctctgcgtcaacaactgtgtctcgcaggacaggctctgcgtcaacaactgtgtctcgctggataggctctgcgtcatcaactgtgtctcgcaggataggctctgcgatatcaactgtgtctcgcaggataggtctgcgtcaacaacaatcctcgcaggggggcgctgcgttaccaagtgaactccgcagggggacgctgtgacgacaagtgagacccgcaggagaccgctgcgttaacaagttcctctgcaggagaccgctgcattaccaagttctccgcagcctaggtcctgcgtcaacaaagcgcctcgcagggacatctgcgacaacaagagtctccgcagggacatctgcgacaaaaagaccctctagcccgtgcaggcacctcttcgtggtgctagggaccagtattcgagtattcaagtactcgaagaagcaaagacctgcgcaatatcttcatcgtctgttcattattccgaagggtcatcattggatactagagggagccctagttagatcttcgccaattcaacagccaagatcataaactaacaactgaagcgtcttcagtatcaaatgacgtatttcacattcttttcccttggtagcttgtgatccaatagcttcctcgctacaataggaattggcatctttcattcagatgtaggcaaacagagatgagtgttgatgtgagtgttgatgtgagtgttgatgtgtgttgaaatatcccggttgctgagataataatgaggctgggatcacgtgcatacatatatacctgttcaccagcctacttgtatcttagacaacatgcaacaataacacacaatcaactcccattcataatatgaacactgaggcatcacttatcaatcaacaatgtgagtgttgatgtgagtgttgatgtgagtgttgatgtgagtgttgatgtgagtgttgatgtgagtgttgatgtgagtgttgatgtgagtgttgatggtgagtgttgatggtgagtgttgatgtgagtgttgatggtgagtgttgatggtgagtgttgatgtgagtgttgatggtgagtgttgatgtgagtgttgatgtgagtgttgatggtgagtgttgatggtgagtgttgatgtgagtgttgatggtgagtgttgatggtgagtgttgatggtgagtgttgatggtgagtgttgatggtgagtgttgatggtgagtgttgatggtgagtgttgatggtgagtgttgatggtgagtgttgatgtgtgtgtgttgatgtgtgtgtgattgagcgtggtggtgaatggtcgggcggtgaaggaggtggtcaccgtctagaccttgccatcggtccatgccaccctcagattatgtaagattcctgaatagggggttcaactccaacttctggattaatcggttatttacgtctatcactgtcacccaccgccataaccactggtatagtaggtaatcgatcctaataacggtgtatcctgttgtataatttattatatatgttgcttttatgataaatttattagtgagactagtagacagtatgatgtgagtggatttgtaggttcaaccttttttgtggtcatatatatatatttacacacatggtactcgcatcactatttctatttattttagttcgcactcccaagtttcattcagactagactcaacagtccgctgctttgacaagcttggttcaatccaactcgtccattatatatccttccacccaactaatccgaacacatagtattgtgggacctgtacgtggctaaaatattgtaaagtaaatacgtgcgtcaagggcttgttaacaagcgacccatgggccaaccgccaaccaacgccatgcccgcccatagacaggtggaagtaactcattgcgaatccataggcctcgtgggccgagtcgaggtcgatcaatatccccagacgtagcaaggaggttttcttgccatctcatccacatgatagatgtatcaatttattgattctatctcgtaagccatctctagtgccattctgatcactcggtgaatttgcatacagcccctacttcgattaagctggtcgaatgcaaaccccagactgccctccgttggttcaactatgtataggcaatacatacgctcaagatcagacctaccaggcatagaagcatttataaggaaccgctcgaaataccattttgttggctcaactaaacatcgtgatgcgatagactctgccttcttattcaaagtcatcgcttcagtcggcgattgcaagtcacttaagcctactctactgtaggatggctatatcctagaaccatcccgagtgtgaaagtggattcgcaacaaagaaaaccaaccaagaatatccgatcggctcctacattcgggagtcgccgcaacattgtaagtaatccccccgttagtaactacaattcatatcgccagccgtaccccatgtatcaatatccagtactgcgtccaaaccgccggtcgttgctttctggggcgtagtacccgggttcatgcgatcaagcttgctctgctgccgatagaacgcagcaggatggctctgggtggtgttattacagactaaaactcatcttcataaaggatctgcttgaacaatgatctgtcaaatatcgtccagggcgtggtgagtttgacaaatatatacttaatgctgaaaggatgccgacgctggtggacagaatccgacgaggcccctggcaggagctgcttacgcgataggttagaaaacgacatcaatagacagagacgcgcggccagcttagtgacctgcagtttcagtgacatccaaagcatatacgactttctggatagttgctgggctttgatagagaaatgtgtgcttgggatccaaatacaccaagcacctgttccaaggagacatttctgactccgacttgatgtagctccgtatatttccgcttggttcatttccactcgttcgtatgtgtcgaacgcctgagcaacacggggtacgaggtgggacagtatcggacggtctttttggctctttagttggctcggctgtgcctcggtataaacggccttatcttctcggttcgtagctggtaccgaaattagcctgtaggatagaaacgaagggagttttgcctcaccttctccttgcacgcggatttggactaacaacatggccaacggcgaaggtaggaatcccctgtcattatgcaagacgagacatcggcatttctcggcgcctgccagataatcaggcttgaaaagatgccatccgagaacgtggggccacccattggacgccactaatccaattcaggagggctattctttcaccgtgttcgaatgccgaaagacacacggtggtataagccattgggatttcgcgtatgtatcgcgtagacgcatcagcacatggcctgaggtacagagtcgactgagagagaagggcgaaggtaaaggcgatcagaactttacattggctcatcatcgatgccaccaatggtcatgtcggggtgatagagcgtgggatcacatcggtatcggggagcccgagcagacaatgcacttgcgcgcttcgactcgagtaacgggaacatgagggtaccccctatcgtacgatccgagtcagcgaggcttgaaccactaggacgagtggttatgacttaccagttcataaagatcgcagaatgtttgcttgcaacgagacgatcaattagatggtgatcatattatattacctaaaagatcaattataatcgtcttcatcgatgtggtcaccattcatgccatgttgacatgatgttgtacccagaccgtcgcagtctccggctgtcgcttcgaagaagccacgctgggtacaccgggcaacttctgagagccaaaggcgcatgacgaacccacctgtgataataaactgtacagtcgtaatgggataagacctcgggatgcggacggccagaggttcatacactccgccgttcatggtatgaaggcggtgaggtcgaaggcggaagacgcgatagagcacgcgtcgtagtgatcttggtctttatctccgacccgggataaaaggactcctcacaagtatgtttcacgggtggcgatgggctgctcccatttacaatagcatagaaatcagtaatggtgttctgttttggggcacaaaagttttcacaaataattggatatagcttgtagatcggcgagataatccatgactcacatgttcttgtagccaagtctagggacgaagagacggcaaggagctgtgactcttacgctcgtgcattgtcgtcgaatgtcctcggttctattgaaatcgcatcgtcttcaggatcagtgagacaggtcaggctaagattcacacacctggggcgtggatattcgagctctcaggaatgcacacaggggctgtacagtagatcagctgaatctagtgttgtggcggagacctcgtcgcgtagacactttgaccagctaacccaaaactcgtatctttgatcgcctggcgtgaataggagtgcatctggtggagatcatatctctcacaggtactgtctgacttgctggtccatgatgtattctataaaagtcagtacagcggattttagtactcgatcaaaggggataacctatcgaatgcctcggacacaagcctgctcgactttgcgtagtcaagtgaataaattgtagagcaaattgcagggcgcaggggacgtatttatagggttctcggctccttctgttgcgcaagtgcttgcttgggagcaagcattgaaggacacctatcctaattgaggcctgttgaaacccatgtcttctttttaccgcgactatttgcggcgacatctttgatgcctttagatgttcagtgagagagacgagtaagagtggtgttgagaaaaagggacggtgagttggtcaagaaacgttggctgactgttgaatccttcacggccctcttaaatttggactttgtgggagatattcaatccgcaatgacaggcccatatttcttgttctgatcacctcatctgtgcgactcaacgaaaagcgcctaaaatttcatcactagaaaccatggacttgttcttcctagcctcgcttcagtgttgtgttggttgtgttgagttgtgggtctctcccgtctatactgcggaagcgaggtcacggtcggtcacggtcggatgtgcgggtgctcgacccgtcaacccgttgaagcttggctatacgttgtcaacactcaattttcgaacttgtgaccatgaagatatattaagacttttttttttctcgttttcttttttgaacctcttttttttggtgactgtaagttctacaatgttctgttcatcgagtttctgacactttcaacgaaagtgggagaggtgtctgattgaaatatatatctcaatgagggttcatatctggccctcaacatcgtgaggcttgatcagtttccccgacgattcgttgacactatcccttctatcaaattgactgccaaccgcccgctagaaataaaaaacaaattccatccaaaagctgagtgcgttgattgactatgtggtgaccgtaaaactcagtctatagccgtctgcgtctgcatattctataagagataccaaggctagttggaaacagtactatccagatccttgactttctcctgtggacaaaatggactccccaaacagctcgccagaccaggaaaagcaaggagaacagcagcccaatgaattgccaatccttaatgataaggaccataatctggagccttcagatcatgtccctccattggtaagtgaaacccttcggcttcgaattctttggctgaccatcgtagacctccccttcgcaacacgaagaagaaataagacataccttagcaaccgagccgtttcaacccacctggaaggtgctagcagacctcgaacgcgacgatcccaagtttgcatttccagcagctcgacttattggactgtatcgacgtctataggagtcgtgtatatccaagcacatcgatgtccaaaagattgaccagagcaatgagatcttaaaggaggctggtgcgtacctaaggaaagagagagacggtcttcagcttcaccacgagaagcagctagctcaactgcgctttttcggacaggcactggaatcatctcgggaacgacttattagcctactcgataactggaactatccctatagtcccaatttggcagggttatcagacgttgcaagagaagcgtaagaaattgcctattccgggctgccctgtcctatagtggcgatatagaaatactataagcggcagacgcggtacaaggggaatcacaccgtatccaaagcaggttatatattcccgaggctttttataagaagggcatcaaatagtcattattcattatcgtggtcttgactgaaatgagtatacaaacaaccccgcttgatttagaccaatctcaatcgtaatgactcgatatattatatacaaaaaagtgtgagtccagggatagcgtcgggggaaacctagtcaacagagaatgtatcgagagactcgaatatagtagagattccgtacaaggccaaagggatagtcggaagccagtgtcggttacacagatatcatgccaggtaattgtatctagtagctatctgcgtatccgatagagattccccatagccgtttcaacccgtagcaggaagaacagaccctttcctatagtcctatcagatactcggtcaaatcgcataaatcgaaattctatccagtgcacctctttagggaaaaggagcgctaatatatggaggaaaatgtcgctagcccgagtagagttggccagatgatctggacctgtccacttaaacccggacagactgtcgagattaggatagaagaggcattcgatcaaggaaggctcttaagtttcgtattctccagggtcgtctttgccaaaagaatcctgccacagatcattaggattagtagcgagacagggaggcggtgtcggtataccagaagattcataccagatagcgtaaaggtcgagatctaaatcgtagtctgtaatattagcgcaaactcctatcaaagaaacgggtatagaccattctcgttcaatccgttcatttctggtatatgactggccgtcgaacgctgtagggaaatatagaggtatataaagcagcgatttaacgtgggttaggagggatagaaagctggagactgagcagtttttattcctctcttattacacagaatcaggacaaactagggggatttatagctagatactaagttatcgaatgcgttaaacgtatcaatagcgtgcacgttggtacctgtcactaacccaaggaaaattcaccagcagtataagccttaactctccttagagaaaacagaaatagatagcgggaaatcaaatgtcattatttctgcccataaacgctctaccacatagagactttactaaccctcaggctcctcggcggaggaggcttaaagatcgctcgcttccaaggctgaaacgacactattacaaagagcctgaaccgctcgcttacactcccacaatactgaagcttacatattacagagctgtagaagagtatcgctatcgcttactagcaagtcatttgacgcttaaagccgtcgctactcctcctcgagtcgtattttctcggccgatttgacgacgtagcattaccatagacaaaagtacaagtcaagcaatttgaggactggtatagcaagggagtcattgaggtttactactttcatgaattccgccgtaagggtaccgcgtattctcgctgggatctattcagtattagtggggttttcattccctacggtgggggatataaccgaccttaggttcgatggttgtgccgtttgtgacttgctgtggttagttttctaacttgggttcattttctggagcttaggatactcggcactgtctcttggccggccgatcaataggggaaggcgaagtgggatggtccattttggtcatcaagatgaattggatctgaaattacgcttaaggcgcatttatagctgacaattcacacgaggctgctgttacttctactagtgcttccttacctaggatcgaccgcactttggaaaggccagtgaatagttagctcaactgttgatactcgatcttaccggctgctcacgaatcatccaacgatatacgaaaagggagaaaagagttaacgttaaaaaatcgttacccgacctactgaaggtagtttataagtgttcttgtgacgcgttgaatgttagacatcaagtagacctcggtgaaacttaaccgtaacattaatttaactgcaaatcatttagaacgaaggaaacagatataccgcgtttaagcttaatatcgataccaattgacgttagtaaccgcggatctcgcattgtggtatagacctaccaaaagtagatttcactagctcttctaggctaccaatccttagtgactgcaccaaaaggttcgatgagtgttatcatattattttgttttggataggcctccgggcattattggtatttcccagatccaaacgatctcctcaaactactgtcctcccacgtaccacgagcacgttaactgtgagatatgaggaaaacttgtttttcgagatttcagaggcttaagcgaaagctttataaattcaaatatacttttctcagtatcagccgatcaaaatctctcccagagatacctgccgccgcttccgaattggaatacacacgacgatcagccgccccatccccagaggcgtccccaaatgacgttaacagatcatgaaaatgagacaaaggcaccccgatcagttttaatctactaccgcgaacattcacaaagcagactgaaactaaactcttttagttccacaacctatcgggtcgtcgtgcgagaataaagagcctttaggtagccattctgtacaaaactcgtttgtaagggaagttgagagaccgcactgcgtaggcgagtaacaaactttcgttattcgtgaattgcatagtttataccggatgtatgtaacaactgtataattgaaaccgcttattatctggagaatgtctggatcctcgatattcacggctcgggccaacctaaatgcacctacctaagggtatatcgtagtttggcttcttcaccaggtagcctccggttttgaaaaaagcccattggggtaaacggctgtggcaacattgtgggatatgctggttggccattaatgtaccagtggagccgaatcataaggctctgagtgaactgtgatatctttagcttgatctaatagatacaaaaatcgggtggcccacacttttgcccgatagcgataacgtctgcactcaaagaaaagtaactgctttgtagctaaggaaatctcctgctgcgctagtagatacactaacagagggccctgaagcagctgaaagcataatactccatttgtccgggagtcaagcggcacagtgttttaacaatgattcccgtcatctcccgcccatatgcaccgctcacggtgcaagggatcacctaatacttggcccaatacccattatagatgagcaggattgaaggccataatgaaaaagtaaatttataagcgtctcgttccaattacgaggtttgtatgtaagcagctggtagtccccagcacccctcatcttgttcctgaaaagcggttattatttcctgggagctctagccacatttgtcgggatacgcgcgaggcatatataatgagtggagatacgatatacgggacttacatggcatctaggttcactgggatatatatgcgactttccccttataactgggcctcaagatccaagaaaccggcaaataattcatatagcagtgtagcaatagagcctaggggacccattttaagggggaacataccacatatcgtatccagagccttcggtcttaaagctcataacccaacacgctcttcaaaatacccttaggcgactcgcagtttgccagctataccattccgcgaatgcacggtctaaatgcacggcccactgaatccaaagagtgaactagaatgagatatccttcttacaacctactgatcagcggtatagcggtagatactgcatcgcaatatattcttcgacgttttgactgtttcaagcgagaatttccatgtcagcagccctgacacaatgtaagtatagttcccataatgaaggcatataaagctagcgaggaaaccctacagagattgcgcaacatcaatacctattcgaatctttttctgcctttatcatcagcacaatatcctctgtcctaccttagaacccatttgctgtctgcgggatcccttatagtggtcctgtgtcctattgcggggtgacgaagaaaggcaagccgtgcaaaaactctgtcaaggttcaagacactaagatcggctatcaaaagttaaccactctctccagagagccatttgacctatcaactttgcagtcaaagctctgcaatattgctagagtctttctctgcgcgagatagcaccgtcaacggcaggccgactaagttagctagcggtagtataaagcagccatccgcaaccaggcgcgagtgccgcatagctctagagttgccgctccatctattacacatctaggccagcgtcagatattatcagtctccaggagtcgccctgcattaggcaacaccgacaggtcaccttacaggctcagataagacccaccagtgcggctgtcaactaaccccgagccagtgcagccattcaatccatttatcacttctgcaatactacagacgaacagtgttccatggcatatttcgccggcttaaccagctatcctgacatcggtcgctaacatctgggctggtatccaaagcttaacgctcaaggatctcaccctgagcgacaaggtcgacgacatctactgtgtattttgtcttaccgaggataaagatcttacaaatgaatgtgtgatcttacgctgtcagtgtaaggcgctttcccacctagcctgcgcggaagagtggctggaaaaacgaagtacagtttttgggacgtcatgctatatatggtaagtagggctgattctgattatccaatgcccgaggtgctgatcaatacagtcgaaacgaagggcctttagacgcttcgattcgcccactacgagtccaatcgtcggatactgagacacatcatatgcgcacggcaagtgaatcatctcccgagagagaacctgccactatcacgaattcatcactaaatgacccgagtcagagccagtcgcgtcagcggtcagtgggaccccaagggagatcagttgagcagagcgtggaggatggcccccgtcgctcggctaggctaggagctcatctaccacaaggcccttctacatctgcaccaccccgccggtcagcacgactaaattccactcgaaggtgatctttgtcacagcggaggtgtgacacagtcggcattgggattagtatcagagagcatagccatgatttagaccttggagtaagcttagaaataatacaaatgaagtcctgaacgttcaaaatcgcagagcaccaaaaccacgcgaccttttcatctttgcaagtactagatgccaatacacccccaaaaccggttggcagtttcgcttaatttcggatattttaagatcgaaaccatattcatacctaacggtggtggccaaagaattgtagacatggatttatctcagtggagcgtgtcgcgtcaagacggagattgttgacagaagaaacacatctcgggccggcaagagactctggcaaactcctatgctggttaggttgactctcggaatcaatatgttgaatctgggaaactcaaaagcatttctaggatgtcaaggatatacattaagcatgcggaacggatggagatatgatccgcaggggacccacatggtgtacatgggttcacctgaacgcgaggaagctacctttcttttgcttcctcgcgctgcgtcttgtatctggagtcaactatagttgtttttgatattgattattcatcttgaaacactatccacctctatgtatacgtgagaccccgccaaccccgccaaccccgacaacaaagacaacaaagacaccatgacctccaagtccaacaatgggaatcctaacgctcgaggagcagaggaagtagaacggagaggacggacaaaatcaacgcactgagcaatcgcgcacacttcgtgccatctttgcccatagcttgcttttcatatgacttggacgaatgatgtggtttgtcttcatatcctggttcaaaagtgtaaccctgcaaccgttttttatgtccctgcccttgcaggctggaccataccatctaccaagcgcatgtggatgcggtctgtagtcaggatcccatttcgcgatatcggatgaccgaagttcctttatcgccggatatctgtagtaacagtattccgagtagactccttgttttgtgttggtgaaaaccttttccaaaggtagctttaccgattcatgacattcaataacatcgtaaatattcaaggtaatgccagacgggaattgcacctcatatctattcttgtcatatttccagccatcctgaagagcggcaaagaacttttcactttcgtatctgagatcgcctgaataatcacctgcgataagagcaaggtagagacgggttgacgattttctgggccgataggcgctcaagttatggccaataagaactggagaacatccatcaaatgtcagagcaaactccagccaactagtatttttgaagatctgtttccagaggatagaactggtgtttatgatgttttcgacatctgctggcgtcagaaagtccttgatacttaaccaaatatcaagtggggtttcaaagagcttcattgtgaatgactcgccctggtgccggtgttgatccagatcgtaccagggaaagtatttataacccacagcgctatttcagaaatgccttaatcttacaaaataacaagcaagagtcctacatttttgtcaggccctccgaaatgcacctatacctgtggttatagagctggtcaataacagaatctatcctccggatttctctgaaagttgcggtggcctaattccttacccatccgaacctcccttatttgcaccctagctcaaatagatattttccataggcgagaaaacatgctgttgatgttcagtggttgtcatgttcaacgttccgaacgttaacatcgattttctgacaccattcaccacccgtacatcgccaaaggttgttatctgagaatgttcagcgaatgtatcagcatgatactaccaggctgttgtgccccagtgctacaggaagcacaaacaagactccgccggtcgcttttttctttattagctgaatcacgacgggatagcaacccacgagatatcggaaatgctacgcccttccacatgtccctattcactaccaattccaatctagcagccatgtggctcccgggaatacactgtaaatcaattggtggttcgggcaacacgtggtcatggcaactggattgagacatcgttgattggatcgtcttggtctacgtaccgtgattgaggcaacaaattaacatccgcagtcctcctgggagccggcaccgatgttgctaacccgcgaaaacttgacagcagatatctttttcatggtggacatcaagcattcaaatgctcatgattgtcccattgtggaagctattacacccttattttcctcttgccagtgcagcaccatcaccagcaagaaggaatcatcatggaccacaagctgtcacaggtatcaaagggtccgataccccagacatagaagaaaacaatggactcacatggcaaactggtatcgttatcttagatccccttctcgaggaattcatcggctgacaatctatctcgtggaggcaatgaaccgactgaaagcttccgtcgggttgttggccagtttatcctcggaaatagcggccacacaagccaggttttacagccatctgttgaccagcccagtggctctgtagctacagagttagctacttctgttgttagctcgagggactatatgatcactccaagcgccatgaaggctgaaagccacgacttgccccctctgaacgtgaaaaagagaccagcggaatccccaaccttttcacgaaagcgacgtcgacattcatactccagctctcaaatactgggccgctcgcagacttgtgcatcgaaagagactcccaagccttacaaaaattagcaggcaaatgataaatgatacaattcaatacctgcaaatgctatctgaccacatcttgatctccgacaccattttgtttagggagtgggccactatgcatctcgccacccaattgctacaaagctggtacaaagatatcattgcgaggtaggagatggaattagacgccgtatccaagtgtactttgtcaccgatacagccagaagagaagtgcacgaagtgtgctgccgcggatgcggacgagctgtatgattaagaggttactcctttactacctcgttggctatcttttgatagaatagctggcccttttggaaatggacgagaaaatatagtgttttgcaactaagggacagtatttaagatcttgttaagctcctagtctatcagtccgcggacaaagaacattcaggtgcggagaccactcgacaagcaaaaataaatatatatgagccagctgcatcttgatctccaaataatgcaatagcgactaaagatgcctagagtacatgtatgtaccagaaaaatcggaattggaaggatgaagcaatagcattcttcaaaatgctattgccttgaatatcaattccagccactctttggttattcagcccgcttcactcgtagagatgcaactttttgtgctttagcatctacaataactggaccatttttgccgttctgttaatcggctcatgactgctggtccttacaattcggctgtttggcggtcattctgtgtctaaatgtctgcatactcattcagatgaaccaatatagaacagcttggccctatcattggtaagacaagaaaatcagagcgccggggcccaatcagctgtgccagtattcgtccgagaattgtgagagagcgactcgctgtgctgaaaagccagcttccaagccaaaggcatacctaaccataaccaagtccaccgaattctctctcttcacctggaaaacatggtcgttgcagcgttaactagatgctggtcgcatagaagttgcgagtggtcattacatggccatgtaagtggagctctgtgcaacgcaataattacaggcaagtttgccacttcatgagcctaccaattattgtaataaccacaccatgcctgatccggtgcgctcgtcgactcatgagcgaaacataaggccgccgttacaaagaagctgccgcagactctgactcgtttgatagcttccgtctttatttttggcgcgttgtcggtcctagggaaactagaatttgtccgtggacagtattccctagcgccgtgtagggtaacaagatcctgaaaaagttgagttttgagcagtgcggtcatctgtcaattcgcatcgagtttctaattagctcgagactcaggttcattatggctgacagtttattgtcagttataaaaggatacacgcgccgttaatggtttgtatgtaagctctgtggctgatcggcctcatcttacgactgtcagtcgatgctggcatctcctatcacgaccgagagtcgaatccctaacatcgcacgtacaaaacaaccgaattgcactttctctcttagttcttacgttttgaatccgagagaacaccgccctgtcatcatgtcatccaacctacccaaagacaacatgatatgtgaccttggcactatcaaagctcaatatcagctccccatttcgatgtcggcccccaccacccgcgagagttatacggcggccaccacgaatttaacaggacctcaccgccgcggtagattgaaggttgtcacggggcctcccaaaagcctttgcctaccccacttgtgtggcctggagaatatcgcatccgtcctgattgtaagacaggagtcaccgtgggatacctatcggaaagtcattacgtatgagaatgctggcaaagttacaattgctacacgccgcactcgcccgtctcgcatggtagccatccggacatacgggaaagacaatgctcgaagattgatatacagattcggacgtctagaacacaggaacgttctctccttacatgaatgctacatgcacgaagatctcgcgtccttcctagttgatgacttgccgctgacgctggctcatgttgtcgcttttccgtctttacatgaatgctacatgcacgaagatctcgcgttcttcttagttgacgacttgccgctgacgctggcgcatgttgccgcttttccatctgtttatcctagcgagacagaattgggatccattatctgccaggttggtccctcatgcccttcgatgagctgttctgacattttagatcctggatggtgcctgctacttatcttcatttggccttgcgcatcaatcactggcctgtggtgatgtattatttggcattgacgggatcatcaagataggtttgttaaccgccgcattcttgcattatctgactaaaatttcgcagcaagtttggacctttatatagattgcacgccaaagcaatctgaaattgcatatattgcggctcttccgtcgataatgatgcggctcatgcagaaaaatggcaaagatcaaggccttgttggcgtgaatgatctggagcgatggccaatcgattctgccgctgtggagattttgtccgctaccgagacggcagaatcaatcaggtcgctgagaaatgtgagttctcctagcaaggtatcgtgtttcgctaatgtccagtagcaacccctgttggcggagaagcaccgcccaaacgatgatctggtggtcctcgcaagagcagctctgctctccactagcttgaattgtatttacgaccccggctctaaaaagtgctaaaggacaagatctggtacgcaactcagatatccgcgaatcctcgtcatggtcataggcttcaccaataagcaacatttcatgcgtctcctacagttatcttgccacttcttagggtactttgtttcttccacgacataatccattgtttttgcacaaatccttctcatgttgcgttctagtgaacttagtactacataattaacgttacattgctggtgaaagatcaaggctaacattgaataccgtagggacttctggtgacatgcgcaacctttgaagagccgagtgtaaagaatttcatgcgggcaatctccattcgataatgaagcctcatgcattcttttggaggagctcacaattttcctactaaaaataaacttagctcttcgaagcccaattcttgagatcgcaacggcactgaattgttagacgtccataaattttaaggcagccagaacgcaagaagtagggcggggaaacagccaaactaatgtgaaggtttcagaagtacgtatgtatgtcgcttgcagacttcaaccaatggtgaatactgggaagctgaaacaactggtgagcaacggcattcaggggctatgtctccagcttttattacccccagcggccggttagtgatcgtctttaacactctaaagttgagttggaaagagccagcaccggttggttcatttcaccgctagtgaactagaagggttggttggcgtacgagctatccacgccaaccctattgtttctcgcctccttccaaatttccctcgggaccataacttatttataaagacctcccctcagcttccactggtcttcatgtttgcacagaacacagtactttgaggttattatttgcaacacccaccacaaattccatgcattacattactgccctttccttgatagcctccctcctgggaatggtagctgccactggaaactcagtccgtcgatatgtgcaactccgtgcttggggtcagcccggctgtcgtgctagtaaccttggcgaggaaggtatctacagcgattacattggtttatatatgccatttagtaattacaatataatccgctccgtgagcgttgagtctgtcgaatcaggatacactcgtaagtcccggtaatttttagactgtatattaccactaataaatttttagtgtacatttacaggaatctgcagtatcattctgaacggattaaggttccttttataaaatgcgttagtggcgaacacgagtataaaatgtacatattggtatacgatgactgagatgtacttcccaggaagtggtagctaatcgaatgcataactaggagatatggaaggctgtattaaactgtattgtacttacctactctgtctcatttgcaccccaacttatgtaagagggggtttttgagacctatactacaaccgagaaaattacaggaagataaaccagtcagaaattccagcaaattaacttctcaagatgtcaaaatggcctcctcgaacttgatttaagtaaattaacctttggtttcttgatacaccaaacgcacttgaccgtcccaggttgaccacccataagtgtcggttgtggaggattgaaagaggccagctatcatatatataagctgacaattcgttgaattattttcctttgaaggctccttagcgttagtcaatgttatcggcaatggaagtcgtttaaaatgttgccgtatccctggctttatgctctaaaattcctcatgaagcgttcttttcagcagacgcaatatttctttttattataagctgcccccctcatttactgtatctttttgctatccgagaatggatacacgaaccagtgccttaataagaggtcgaaaactaatgtcaatgacaactttaaaggcgttattcttctgatctatatctctacagtactagtcatgaatataaataattagaacttttccagcctccatcaattgccacagctattactcgcactgaaatggccccaagcgctctacggtccagcggccaagtgccaaaagccattctgagctaataccactactcggtaatggttctgaaccgccacagaaaaagagcactcgctataatacacacgcttacgcaaaatcactacctccagcacctccgggatgaacccggactcctcgaacgcggatacaaaataaataccacggagcacaggtgtcattgctagtaaagccaacagaccaccgcggcgggatcaattgtcataactggattctacagatgcaaaaggccccggccgctcaaattagtatttcgaagatacctcacttttagatcgggatgggctcaatgtaggctcaagataggctcagggtaagctcagggtgggctcggggtaagctcaaggtaagctcagggtaagctcagggtaagctcagggtaagctcagggtaagctcagggtgnnnggtaagctcagggtaagctcagggtaagctcagggtaagctcagggtaagctcagggtgggctcggggtgggctcaggtgtggccagattggtctcaactccggtgaggggaaattctgtaagttccccgcactgtattgtcacacttggttatccattacccgccactcatcgctgtttgttttgtatggtaactttacatcataccggaacaatatactgtaatacaccgtaatcgtgccacgtcgcccatcatggaccattttaacagaccctcaaatcaattgtctttatcatcaattggtcttcctcgatactgcatcctgcatcttagtagtgtccagtatccaggcggatatcattaatttgtctgtaaagtgcggggtgtatatcaccgttcgaacacacttgaagcccggtgcccgttttacttgtcgtttcaatctagtccttagctgtggtactatactacagtttcatgattcggactcgtagttggcagctgcctgtatgtttaagagcacgacatgacaaaggaggcacatatgacgataccccgttccttccaccaacatgacgtcttttacccgaaattggccaggtttatagaggcgaaaatcaaacattcttgttatacggcaaagaccagctctgccaaaatttaaacgaggctacatgtcccaaccaagataaaaagtatcgcacccataaccctgaactacgaaattctccgataacatcttcaggaagtgaggaaacggaaacttcttcctattcatgccagaccaagggctgttttagaagagcgggagacagtcccatacaccctttccgtatgattcagtagcgcggactttgactccaacttctccccgcaaatagagcactcatagtacatatcatttgaaaacggcttgatatgcctgttgacgaagtgtcggctcagagatccagggttcttgtacatccgcaagcgctctctttatggcagactagggctactaaggtaaatgaagcagatcgttggtctctctgttggagatttaacgtaaaccgaagcgatagccttcgaaaacatatcgtcgctcttatctgaagcggttggattctaccttttagacaggggggcggctggtagcatatcgatatcatcggcggagcgtttttaggtgatacgacgccgcgagggtataccctcttctgcatcgcatactgtaatcactatattaatcgcagcaattcgacgcttatattctttctcgatcgtcgtacccggcatcgttaggacagtgttaataagtgtcatatgctgcggtatcatatagccggttcgttccagtgcaaccaatacttcttcgtcaacaacctttccggaaagttgccgttcgctatcgatcactggctgctcgttcttataacgctccaggttctcacgaatcaagaggttccgttgccgccctttcttattctgcagttgcttaactgagcgatcatactgctcgtctacattattaaacttttaccatagctttttcactctcttctcttaagctttccgtcgcttacggatcgttcagggttaagggaagttcctccgcaaaagattattactaaactcccgctgtaatgcagcctaggcattttcatatatacgctttttagcatctcggtcttatttccgcacctgcttcctctcttctagagtgcggacacgtggaatgttattgatatagcttgaatcctctagtcgatagggtctgcagggatcaatggaccgactcatcgagcaggcaaactgtataagctgcttctaagcgggcaggccccatacaattgcctaggcatctacatgaatacccacgctgtagtgtcgaataaacgtatcgatactagcatactgcagcataacgttctgtagttcattggatacatccgctgattaagaggaaagtattagtctagggatcccatcatatacgttatttcactcacgactgtcgttgaacgcttttgctgcaccgtatcggaggcaatatggcttcgcgacttctgcgaagcccgtaatttcaccacctcgtttcattcagtaactcagccatcccctagtaagtctttcttctagtgcgatttaaatcccactaggctcgcgtagtacttggtaaaacacgttttgactgagaattttgtctttcaattttaattcctgctcaccaagtctatagaggacccgaagacggtacagtttctcagggcagtccatcacagggccgtccttggacagacttttaaatgcgccaatcctaaagagtatacctagcagaaagacataaggactgagaaccagggtgggatcaaagatgatttccggaattgggaacgtattcctatttcaaaatggtaagcaagctttgactgggtccattggcggaagaacttcggcatacagagttgcgcagagaaaatagccattaagtgaaaggggaaggaaaggaggaaaaaagaaaggggacgtcttacgactctttctcgccaagaaatgtttttgtgaattccggcctcaaataaatgaaaagttggggccgtccaccatttggatctcgaactaaggttagcttaaggtcctggaagcgaagtttcaatagtgctcccggacggctaccggtgatagcggctagctagcagaaaagaaggagttgtatccggtaccagctataaggaaaggtcatttctgttgtggataggatcactcgcgcaaactcggccacatcttcgacatatatcgtcgctttcggtcgaccttttagagaaagacctttttctgtcgcaactatcgcaagcacctatagaaagtcagccgcgtcaactgatattgatatcgatactcaatcggaatctcacgtcacggatcttaacatagacatctttactgagctcatatccaacctcggccttgtagatcagatgccaccacttccaaaatgcatcgagcgtgcttttggttttcactcccgcggtgcgacgacgtctatcctttccccgtcgctggtcacaccgccataagaagagagccttgaggaagcggaccgtctcctcgttatcagaaagccaatacaaacattccgcaggatcgcgcttagtgcccttgcagaacctagaacaatcagcgaaccaagtaaggtagggggatcttaaagtgaagtctcacttatcccagaaatactgcgcctcatccaatctctcttaggttttcgggctgtagcgtttatgtcgaagctgggaaacatcaagagactcggcctcgtggaggtaatattcgggtggaagttgctcctcttcatcttccgatgctaggtcatcttcggactcaacttcagactcagactcggattcgctgcttaagtcgaagacactgggtgcggtggaggaatcagtatcggaagcgtggtccgaaaaattctcagaatggcatgggctaatatcgctctcatcgccggacggaatagaaccacgagatgccatggcaggaggcgatgggtgcgatcgagaaggtacaagaaggcaagtcagagaatagggaattggtagtaaccggttctcttttcatactgtggccgtgccgttgaggagaccgacctgagagtggaagggttgcttggtagcaagaaagaatattgtgtcggggccatggccgttgatatttataaaatctgaaggaaggagggaaccaaggaggggagccatcttcggttcctctgcttcaggagatggatgagggtggggcggcggcgacagttgctatagcagaaggggccttgttcgggccaggtaccaggcacagccaacacaaagcatgggtggcagtagagagagtcggccgtgtgcattgaggcacgtgatgccaagcccagagacggtgagtggagggcttaaaacggcctccgaggcggccatttctggcctcccattcaccgtctcatacttatgtgtagtattgtttagcgcattttcggccttatcagagccttatactattaatatgattttatcgaatattatatcggcgaattctgggaggtacgagagattctggattcgttcttagagtgtatcgttaatctaaacgtacagctagctagccactatatataactagtattcctatctatcaaatttcgggttacctacagtggggcgaggcatactgctgttaataatatattctagtctcaatggcgtgagagcgaatttcacagggatcgcctatctataaggatttctggaattgtacttgagtgctttgactttctgtattttcgcagctgagatgttaggtaggttagtggcctgattcttcttattgtatccgttacccgatgatattgtgttggcctggggttgagaggtgtttcctatctcctaagacgcgttgttgttgcctgatggtaaaaattgtgactgattattcgggttgtcatccccagagtcgacactgctatcagctatgctgggagctggtttgccaattctgttgttaattgaggcttgcgaggatcaaatccgattggcgagaaacgcgcgttgtgcgggttaagcgccgggaagtgggatccaggaaagagactcagggttggaggttgctagcggtccttgctagctagagacaagtgctcataacctaatggcgtatctgactacgttgtacctgaaaagggaaaacaactagtgtagattcgctaagatctaaatggacgagggagagggagagaggaagagggagtggaactatctgatgatctgaacccacatgggtgaccgccttccggtcacccaacacatgagcctcattttgtatggttgctggaatttaactacagcccaagttatcaaataggtttatgcgaaatggtcataatgatatctctaaaatacggattgttgtgacgcccccaaacagagacacgacgatgcaataaccactatgtgacatgaaacatttcgaaagttgtttggaaacgcgcagattcttcgctgtgattgacatgtgatcatctgcctcaactgaacgtcccattagcaggcccaaaatacccgacagctggcatcgacttgtatggtacaccctgggcgtcggcagtattcaagtacctgtctgcgtcagttgcgcagcgtgccgaggcgcttcataagtgtcctgcgttgatgtttgttgcgtagctatctgttgttcactgcgttctggagtctgttgagttggtgaagagaaaggatactggtactctgtccttgtctgttctggggacggagtgtcttcccttggagttgactctcgtggggagctggtttccctgatcaagtcctgttcaatcgagtctgcgtactggtgtacttccagcatgtccatctcttctgcgttgattctagctgtgagttcctcaagtcttctctggaagttggctttcctctctgctagcttttctgtcattgtaatttgctccgtctgaggggttgcattctcactgtgaacagtctgtgtctcctcttggattggagtaagagtctggttgactctttgcgctgttaactgttctgtgtttttgggaattggtgtccctctctgaagtctcccaaggatcgatcttgtgtgccttggtgcagggagtagcctctgtcgacgaggcattaccggggtctctggtatggttgaaacgctgccttgaattgtgggcaagtgaattgttgacggggttactggatcctgtctgtagactgttacaatctctgtccttggttcggttctggctgcgtcgatcagcgggatggaaatttcgtttgtgtcgtcatctcctgggggtttcgatggctttggcgctaccggtactcctccctcctgatcttcgtcccctggttgaggaaagctgacgtccctcgagattgtaatcttcctagtttccggattccagatttttagaatatgtccgttatccccctcataacccatgaggtgtcctttccaagatcttggagcggctttgcgtgcctgtactctcttctccttcggaatatgaacgtagacggttgttccccatggtctgaggtgcttcagtgacggatctgggttgtcgattccgagttctgtgcgccagtgtttgagtggcgatgtttgagactttgggttggttaatctgttgatggtgtagattgcagtttctactgcgtagggccacagctcctcaggtagcttagtatcgatgatcatcgttctctgaatgtcgttgacgtatccgccgaagcgttctaccgcgccgttgggctctgccgtgtagggtggtgtaacttcgaaagtcattcccttttttgtgccccaagtgatgaagttcttaaattctgttccaccatcgagtctccatattccggggtagcgcccagttcggagtttgattttttcgcaaaatgcttgaagcttgacaaatgcttcacctttgttcgtgagagtcggcccctcgagatatcttgttgcgtcgtcgaggataggcatccagtacttttcaccgttcgggccctcaggtttcataggctgcgtgtctacatgaaatttccatgccacgtcctgaacccgaaattgcggctcacgagaaatctgtttcttggatttaccttgaaaacatgcttcacagtcgaagtattctgttccatactgttcttcgtcgtcaagctcttgtgcttgtttcagcgttgaagtaagtttggcttttccagcgtgtccaaagcgtcgatgcgcctcaaaggcagaaattttattgactaatcctgtttcttcgtcactgtccgacccgtaggatgaatcttcttcgtgtgaatcgtcttctttaggaccgatgaggtacggaaccccgagtgatgtgtttgcaactccaacggtttttccagtgccgtctgtaagtcgcttagttcttgtgtcatacgagatatcctgttcttccaggagtttctgcatgccgaacaatttgccgtgaccccttgggctgtagtagccttttgtcaggaaggtgtatgttgttccgtcttcgagacctgctttgacaaggacctctccgtgtccttcagttaccactctgttgccggagtagtcccggtaggcgtatgccgattccgggctgtcctcctggtatgtgtagaaatcttcgaagtcgtgggtgagtgttttgtctgatccggtgtcaatcagccagctgttgaaactatctgtgtgacgagctgttgccgttatggccatattgcttcgcccctcgcttcgcagtgcgatcgagtaattccatacgtgtgggctgtgtgtccagtgtgcgggtggatcttctgacagataggaacacttttgagctttgtgtggcccgaaaccgcagtaggcacacatcccgctctcatccctttgtgttccttccttcttttccttgacatactcatggatatctttaccaggaggtggttggttgcgaagggtcttcttcttcttgggttcgttggatgtacttgagtcatccttcgaagatttgttgtcttggcttgaggaggcttcgctgttacctcctttgccgcccctcttaccacctcgtcctccgcgtcctccgccgcggttgttaccccgtcccctcgaggactgggctgcgttagcagtcccttctctgtcggaaactgcctggaggctcttgcaatattggtccatcttttcgagtgtgattttcttaggttcgatattactaatctcctcgatgatgaattgaaccttggatatttctttatccaattgccgtagaacttgtgatagtgcgtgaaaagggtgtggttgaattttgaatcgcgaaagaacgtggtattgtttctggtattccgcaatgaattccttcgcagtgttgaagtccgctcgtttcatttcgtcgaacttttttgtttcgtttagcgcattttcggccttgtcagagccttgcaccattaacatgatttcatcgaacattgtgtcggcgaattccgggaggtacgagagattctggattcgttcttggagtgtatcgtcaacctgaacgtacagccagctagccactgtgcgtgaccagtactcccatctgtcaaatttcgggtcacccacagtggggcgaggcatgctgctgtcaatgacatattccagtctcaatggcgcgagagcgaatttcacagggatcgcccatccacgaggatttctggaattgtactcgagtgctttgactttctgcattttcgcagccgagatgtcaggtaagttagtggcctgattcttctcgttgtatccgttacccgatgacattgtgttggcctggggttgagaggtgtttcctatctcccgagacgcgttgttattgcctgatggcaaaaattgtgactgattattcgggttgtcatccccagagtcgacaccgctatcagccatgctgagagctggtttgccaattctgttgttgattgaggcttgcgaggattaaatccgattggcgagaaacgcgcgttgtgcgggttaagcgccgggaagtggggtccaggaaagagacttagggttggaggttgctagcggtccttgctagctagagacaagtgctcataacctaatggcgtatctgactacgttgtgcctgaaaaggggaaaacaactattgtcgattcgctaagataaaagtggacaagggagagagagagaggaagagggagccgaactatctgatggtgatctgggtccacatgggtgaccgccttccggtcacccaacatcccccctacagatctcatatctcctgttttgaaaatgatgatctagaaatgtcgtaatcgtggtagtcgtaaaaaaaccccaaattttcctttgaattaagtcatcccgataagcttcaagaaagctcggaattgctctttgggaagcgcctttgtaaacctgtccgccgcgttctgctttgtgttaacccttaggatatttatatgtccttgggccatagcgtcctttataaagaaccatcggagtgccagctatctggtagtagacttgcctcccttctttattagtagtaactgtgagttgatgttatcggtgtagataactgtgggattgggtcttagtaggctcagtgagtctgcaaccttagtaagctatatagtatcctgggccggctggttgagcgtataccattctgctattattgtggagttcgctgtgattgtctgctttttagtagactaagctactgggactcctgtaaagaactagatatatccttcggttgatttggagtctgtctagtctgtgtataatatatctgtgaatgctatgaattgtagttcgtccgactttctaaagattagtcctatcttagggttatgtctaaggtatttgacgacgtgtcttattgccttgagattagaaaaagtcggtattgctagtctatattataagcgtataatagcgaatctaatatctggtcttatcttaatagtaagctagttgagtatccctactactgtctggtagtattcgaaattctcgttattaagtagattagagttaatgtcttctgggttagactctctctatcttggtagtagtggtatttctttcgtccctgtagtatctgtaatatatagaatcttttgtatgtaggcttcttaagatatgataatcgtcctattgttgtaatctctgtcgagtatgtagttaagatactgttttggttctcctaggtcttttatattataatgtttcttaagttgctttataactgagtctatttctctggaagtaggtatagtaatgataaagttatcgatatagattattatgattgttagatctgcgcagttctttcttatcttaatgtagatatatgggttgtcctcgaggggtctaaagctggtttatcgaagcttatagtctatttccttattctagaggaaggcagagtcttataggccgaaaagagtctaattaagtatatatacctattactttgaatttccttctgtatctgtaaactcgaagcctattagctgtcttatatatactgtctctgtatcttctcttaatatattaaggtaagccgctgtgaaatctacttaatgctatttaagactatagactgcgataagtattaagataattttgattattatttccgatataactagtatataagacttgcttaagttatcgcttttctcctagaagttgctgtagataacctatcttaccttaaagctgtagactttatctcttgtgtttgtcttaatggtaaaacgctattgtcctggaaggacttttgcctttggtagttttaggattaatgtctatattcctttcgtggtaaggttattaagctgtttttctattacttccttctatttgttctagaaaggtgatttttatacttgtttaaaacttgatagtaggttgatatccttattgtaaagaggttttctattatagataaaaggtgtgtctatatctacctaatcggagttatctagagaaagtttctttgcgtttccttcttaagaagtgatatgtttttctatatgcctggtatctctcttttacttcttatattcgacgtttaggagtttttatttaggattctgatatctctctagtaggatactgatatttcttctttttaatctcttagctgaaggttcttaaatttgagttagtactactattactggttctgcggtaggtataataggagtaatcttctcctatatctatatcggttgtatagtgtactgaggcgctttataagtactctgcggtaatatttattatatagcagtttcttataaactgtattccagagtctgttaagttagtaaagagaaaggatactggtactctatctttatctattctagggatagagtatcttcccttagggttaactcttatatagagctggtttccctgattaagtcctattcaattgagtctatatactagtatacttctagtatatctatctcttctgcgttgattctagctataagttccttaagtcttctctagaaattagctttcctctctactagcttctctgttattattatttactctgtttaaggggttgtattcttactataaatagcctatatctcttcttaaattagagtaagagtttagttaactctttacgctgttaattattctatatttatgggaattggtatccctttctaaagtctcctaaggatcgatcttatataccttagtataggaagtagtctctgtcgataaggtattactagggtctctagtatggttaaaacgctgccttaaattataggtaagtgaattattgatagggttactagatcctatctatagattgttataatctctatctttagtacagttctagctatattaattagtgggatagaaattttatttatattattatctcctagaggtttcgatggctttagcgctattagtactcctccctcctaatctttattccttagttaaggaaagctgatgtcccttaagattataatcttcctagtttctagattctagatttttagaatatatctattatcccccttataacctataagttatcctttctaagatcttagagtggctttatatacctatactctcttctctttcagaatatagatatagatagttgttccctatagtctaaggtactttagtaacggatctaggttatcgattccaagttctgtatactagtatttaagtagcaatatttaagactttagattggttaatctattaatagtatagattatagtttctactatatagggctatagctccttaggtagcttagtgttaataattattattctctagatatcgttaatatatccgctaaagcgttctactgtaccgttaggctctactatatagggtggtataactttaaaagttattcccttttttataccctaagtaataaagttcttaaattctattctactatcgagtctttatactctggggtagtacctagttcggaatttaatttttttataaaatacttaaagtttaacgaatgctttacctttatttgtaagagtcagtcccttaagatatcttattgcgttattaagaataggtatctagtacttttcactatttaggcccttaggttttataggctatatatctatataaaatttctatactatatcctaaacccgaaattgtggcttataagaaatctgtttcttagatttaccttaaaaataagctttatagttaaagtattctattctatactattctttatcgttaagctcttatacttattttagtattaaagtaagtttagcttttctagtatatctaaggtatcgatacgccttaaaggtagaaattttattaactaatcctatttctttgttactatctgacctataggataaatcttttttatataaattgttttctttaggactaataaggtatagaactctgagtaatatatttataactctaacagtttttctagtactatctgtaagtcgcttagttcttatattatataagatatcctattcttctaggagtttctatatactgaataatttactataacctcttaggctatagtagccttttattaggaaggtatatattattctatcttcgagatctactttaataaggacctctctatatcctttagttaccactctattactagagtagtcctagtaggtatataccgattctaggctatccttctagtatatatagagagcggctttgtgtgcctatactctcttctcttttagaatatagatatagatagttattccctatagtctaaggtactttagtaatagatctaggttatcgattctgagttctatatactagtatttgagtggtaatatttgagactttagattggttaatctattaatagtgtagattgcagtttctactatatagggctatagttccttaggtagcttagtgttaatgattatcgttctctagatattgttaatatatctgctaaagcgttctactgcgttgttaggctctactgtatagggtggtataacttcgaaagttattcccttttttataccctaagtgataaagttcttaaattctattctactatcgagtctctatactctagggtagtgcctagtttagagtttaatttttttataaaatgcttaaagcttgacaaatgctttacctttatttgtaagagtcggtcccttaagatatcttattatattgtcgaggataggtatctagtacttttcactgttcaggcccttaggttttataggctgtgtatctatataaaatttctatactatatcctaaacccgaaattacagcttataagaaatctgtttcttagatttaccttgaaaataagtttcatagttaaagtattctattctatactgttctttatcgttaagctcttatacttattttagtgttaaagtaagtttggcttttctagtatatctaaggcgtcgatataccttaaaggcagaaattttattaactaatcctatttcttcgttactatccgacctgtaggataaatcttctttatataaatcgtcttctttaggactaataaggtatagaactctaagtgatatgtttataactctaatagtttttccagtgctgtctgtaagttgcttagttcttatattatataagatatcctgttcttctaggagtttctatataccgaataatttgctgtgacctcttaggctatagtagccttttattaggaaggtgtatattattctgtctttaagacctactttaataaggacctctctgtgtccttcggttactactctattaccggagtagtcctagtaggtgtataccgattctgggctatcctcctggtatatgtagaaatcttcgaagtcgtgggtaagtattttgtctaatccggtattaattagctagctgttgaaactatctatataataagctgttactgtgatagctatattatttcgccctttactttgtagtgcgatcgagtaattctatatatataggctgtgtgtctagtgtgcgggtagatcttctaatagataggaatacttttgagctttatatggcccgaaactgtagtaggtatatatcccgctcttatctctttatattccttccttcttttccttgatatacttgtggatatctttactaggaggtagttggtttcgaagggtctttttcttcttaggttcgttagatatacttaagttatccttcgaagatttgttatcttagcttaaggaggtttcgctattacctcctttaccgcctctcttactacctcgtcctctgcgtcctttactacggttattaccctattccctcgaggattgggctgtattagtagtcccttctctatcggaaactatctagaggctcttataatattagtctatcttttcgagtgtgattttcttaggtttaatattactaatttccttgataataaattgaaccttagatatttctttatctaattactatagaacttgtgatagtgtgtgaaaagggtatggttaaattttaaattgcaaaagaatgtggtattatttctggtattctgcaatgaattccttcgcagcattaaagtctgcttattttattttgtcgaactttttagtattatttgacacggtgagcggggggccagaaacggctcccattgcaccgccgtcctgccgccctcgaccgcctacccgtctccgccacttacttaccatttacggcttagcgtcctcatactccccccgtttggggttagtgcccctctggccgcttttatcgcgcccaacgcctgccctccatctataaaacaccgctcgtcctcttcgcagctttgtcgacgcactttcactttgttttcccatctggccccctttccctcggcccccaccaacttgtccgcactggcttgccacctcatgtaccacccctttcatttccaccggggatgccgctcgatccaccgttgagcccgttctggccggcgttgcctgcaacgcgggccgatctcttgcgagttgatgcatcgagatcatgaaactcatgaagataccgtgcaatatgatgctagcttccgcgctaactgctggttatactacgatgatctcgacttgtcctcctgttgcaagcctttctcgccgagcgcctcgcacatttcgcatttcgtacatttcgctggtgttccttgcgcggccaaagaacaatgtctcggaaacactcggcatgcgcgctctgatttgccacagtccgcgcgaggttgcattgtccggcccccaatggtgagagtgcagcctggtccgctcgttcgagggtgcctcggggtaagactgtcgtcatagtccgtttcacttggccgctgttacccccgctgttacccaatcgacgaaaattcggacgactatgccattgtacggactaatagcgaaattgccgcattcttgcctgatctaaattaacgccaagtactgcgtcaccgaggccgacgatggtctattctacagacggcccctgaccacgcgcatagatgggcaactggaaactgggctgacgaccactatggaactaggttacgttggggcgccaccgaggtgtgcggaagcttttgccgacggccttcggtctctgttgagcagccggtgtggctctgcgccttggatgaaacgcttcgggctgaatgatatagagggaattctctgcaccgcttcactggcaattcttatctataaaagagataacaatcctctttgcatggcttatgtagacagagacccatcaatccttccccctctccctttccccttacccctgctctgtatcctatacccccatttctgagtgccccgttcttataggttcgaaatatacctataggattcttctggctatctgccttttcacaatatgtcgagcaccaattttcgcctggaattgtttcgtccatggaatcctttccaagacaaagcttagccattgcgtgatccctctgggacttgtcgctacccaagtccggtctcgatcactgccaccccgctaagttccaattctagcgattatggcccaaaaaagcaaaatattctttgccctaaacctgagcgacacccccttcctgcccgcccgccgacggaagtctgcttagatgggtagaattcggaggtttaaaccactcgaccgggatcggagggcttgggccaaacactttccgctgttagtggtcaggagccctttaacttcgagaacatcttgcaaccacaaaacatagatggtggcgatgatgtcgcttctccaagttttgccgatgatatctattgggaaagagagcgtgaattcctggaattgggattggatggctcggatcctgtcgattttgcccgtcagtatcctcaaagtgttgatcttggaattcctacttagaatggagagcttctaaattttgagaacgtcgatcctgcaatccttgatgaccatgaatctccggttgccgaacaggctgaaataactatggatatcgctagtatcgtaacgcccccggaagaatgccccgcggtgtccattcgccctcagaacaaggtctcaactctctatcgtcgacggaatttaaaggggatggtggacagtgaccgccagcccacaaaaataaagaagggtttgggtacgggaaaaggggatataaggattggctctactcggcctaagaaaagttcgggtcgtcagagcacttctttcactatagtctgtgcccaattctcggcccttttagtcgaagaccgactacaattcctgtcctggctttttgagggtgcgttaactcattgtgcttctgctgttgcttgtccctcaatctaatgtgatggtagaagcgataactgtgtttatacgagcttgaatactgacgcgactgatgtgtagcacgcctcttcaagaaagggactaaagtggtctgcggaggaagatcatcttctaaggaagttaagggacgagtaaaccctcgcttggtcagaggtggttaagcaattttcacgagaatttcctgggcggagcgaggggtcaatcaaagtgtactacagcacaactttgaaaaaaagacggctatcttcccctattgttcttattgcttgacatgattaacataagatattaccggtagaatcgtctggagtagctagaacattatgagtggggatgctcagttgtataaatgcatagtcgaagacatggtggtattgtgggaccggtggtctggaatttgtctggaatttgctcgggtatcataatatttatgttgagattttgtaagatattgaatctagtattcacttcctgttggtgtggtataactgcagcagcgttggtcaaatccgagttttagtacggaggcacataggtttccattttgaaaaataaaatctcgatgcgcctattagctcgaactagaagagggtaccaagacgctggatgcctggactaggtaggatggagaatggggcattaatgatatgaaacgctgggatgtgtattgagagttacgctatagttcttccggtatgtttgttttaccatatataacacgtaggcgttgggatgggtactgatgaccatgtacgacaatacaatgcggagaactcgtggtatttttcccctcatatacgattacataatcccggcggctcagggttggctcagggtatgctcagggtatgctcagggtatgctcagggtaggctcagggttggctcagggtaggctcagggtaagctcagggtaggcttagggtaggctcggagttagctcagggtaggctcagggtaggctcagggtaggctcagggtaggctcagggtaggctcggagttagctcagatttacttcaatgacccaatacctcggtaggtcaatcaatgaccacgcaagcatcaataaagaattatggcattgccatcgcgttcccgctgctcaaaagtcccgtagcaaaaatggaaagagatagagaagaaaaaaatccccttgcgcctttgagattattctattgtagggatgatttacaaatgggtatcatacggctgagcttttgaagctatttagggaacatgggcgggccttccactgtgcaaccgtcgtgggataggatgaaagatgccttcaatactttcgattggtggcggagacgaaaatgggaatcgcgaagaatctggattgtgtcttgatataacgctagagagccttgacactatatatcatgcgaggtgatcattgatgtcgcattgtccaggatagataatcctaagaccagatgtgcggctatccctttaaaagttaccgactgtggtgccggcgagtcagttctctctgttgataagcgtctcatcagagcatgtatgagtttcttgtgattatcattctaatccaatggtggtggaagggattctcttttattcagcacaaggttttttttttttttttttttttcccttttttgagaattgggccaaatacgaagtgaaaaattgatgtcttgatataacgctagagagccttgacactatatatcatgcgaggtgatcattgatgtcgcattgtccaggatagataatcctaagaccagatgtgcggctatccctttaaaagttaccgactgtggtgccggcgagtcagttctctctgttgataagcgtctcatcagagcatgtatgagtttcttgtgattatcattctaatccaatggtggtggaagggattctcttttattcagcacaaggtttttttttttttttttttcccttttgtgagaattgggccaaatacgaagtgacaaattgaaagaaggaacaatgaggaattagcagatgtgatagaattaaaggattgatgttgacttattcaattgttttcaatcttcctactaaaaccccttgggaccgcttactgtagtctctagtctccagcagtaagcagaccccagggtagctgtggagttctcacatatacgtagatgggggtatcattttccggatgaatagtaaatattaagaaatgctacagtcaactctagatacaagatatagcgcgagaaagtaaaagagacaggcttcctcgcatttaggggaacactatgtgggtcccgcaggtcatatccctatttagcccgtatgctttatatatatccttaacagcagctgaggcaattcccgggatgaataatgcaactcccagaatactcttcttgtttactatatatcgagaaatccctttgttagggcttgagtatattggaatttccggtatgtcgtcaacgggcatatattgtgcctttttggccggctggcgtatggtatagcccaagtatcagcgatccgtcacagctctacgaggtatccttagggattcactatgtgtatcctagaatgcatggtcggtactgtggagaatatttcgattgctcctagaacgagagaaacatttcctgggagcttgtcctggatccacaatccgactgtagttattaaggaatctgacggtatattttaggtgcaatagcttatgaggctagtagatattataagtagtgttcctcctacatttaaatctccactagtatatacattgccgtccgttgtttcgaatatacagccagtacactcaactttctgcgttatagtactactatcgtaccacttacaagtaccacggcttatctgtcatatgttgttgtacccggaatttcgaatagtgactatacattttgtataagaggcctagattaatagcgtgacttcttcagcctgttctccaattcctctaatatgtctcttcgcccctgtcagctatgccgatattcgagaattcgatgcagccgtgaagttccttactgttaaacttgcgttaagcgtggtaggtactctttgtgcgtctatgaaacaaaagtgtcagaccaaaaacctgctcttccagagcctcggtcaaagtagtaaaagtaaaagcaggaacgagcatctgacgagtattactttcgacggagagcttttgagccataatccgaacagttttcccggtacgaaacgagtataaatgaagagatgtaatacgtaatggagcctgtaaacgaagaatatatcaagcacatgagttaaagatattctgagcagggcagtttattaccttatgagaccctactaaagggtattgcggctgcgaaagcggagaaagcttcgattttctaaccgaaacatgttgaagatacttctgaacggccgcggagtataccagtgcctcaattaatagagctctatgcgtaaatgatccctccggtaatcaattctaactatgaggaaatatagactatgacgctaactgtcaataaggcttctttgcctctacgcctaaattttgatctgaccatatctgggagatatatttgcggcccacatacggcctattagctcttgttggtattacattatctttttatctctttaatgcttcctgtagatataggagctctgtggaaagttatatgtcgccgccactatgactgggaagagagctttgtcctgtaacacgagcagctttaacagtggctcatcagtgtccgcaatatcttgaccaattctgatgggcttcatacagtaaccttggaagacatagagcgccaaacaagatatattctgttcattcttggggagaatatgtccccccactcgagctttatatttgaatgttttagaagcgaggaacccctataccggccgtttggggtgagggcaagtattgctttgatttgttatgcctttggtggaatctagtccgatgagcttgaaggatatgaagcaaaggaaatttggacctgcgatcaaaactttctgtcgaccatggctttccggcttaaagaatcgctactgtttggcgccgaagtttcagtgaaccatttatagtctatgatactaggtttctagaaggcttttcagtgcgaagaaatctgtgtttccgggatggagttccaaatattaagaatcgaaagcgaattagaagtgctgggatattaccgatgggcatttctagcttttaacccaattcttttaccaaagattctagcctctttgagagaagtgaatgatcttactaccctactatggcactatcagcttattaatatagagagaaacttggacagaagtaagtgaatcgatctttaggctgatatggtgtttaataagagtatagccaatttggccttacgtctcgccaatatatttatatcactggcaccagaacgcttggacgctgcgttctagaatactcgcgagattcagctatcaaaagcggacagagtcgtcgctatggagatgatgtacgtcaagttattcgaagaagtatacaagttgaaccctactagtaagttcttatattttaaattagaaaaaggaatttctaattgttacagaacctactactgtccgtgttttctatgtttcgccgtgaaaatgcgaaggggtatcggaatgcttctcttttaatgaattcaagagttgtatactataaggaatgtgttagaatctgggatttgtgttgaaataatcatttacaaagccttacgctccggaaatgagtctatcgaccttgctcttacgaattaaccttctattgcttcttataaagggcttgaatagaccctttctccgtcctcgtaaatagccattaggatgtataagaattaacagcgccttttatcttaaatgctagcccagtgacatccctagcgtcaaatatgaaattcattcgatgagagcctaccgagctgttatgaactcgaaggaaaggaatcgtataattaatggaaattcaccaagtgccgaatatggttcgtaaaactgcaaccgactatttatataagatatagtacgagaaatccaaagatagagattacctatatttagggagtctatatgtattatataggtccggtatattatatctctccttatattatagttttatttgtgtatgtccctgaaacccttaagtctatatagatgggacagaatggttagcagaattttagttggactggccagccttttatcttggaagcctttttgagaatatcaacttgtaacgagaagtattgttgaaagagtgcactaaatgagatacacgcggtgaataaacgctgataacgaagatataacgttaatttaattagattaaccgtggctttctctaaaatgtgtattgaaagttttctgtgctagtaagagagttgtaatgtttagtaaatgtatagaactattttgtggagcctattaaactttattaattgtagttcttgttcttgtggaaatcgctttcctagattatctttatggtaagctaaagttgaatattcgtttagtgtctggggggatgtatagaccgaatagatcatcgggaaacattatatgttgaagatgtgctatatgttcactatacgtgtactaaagaaagtcatctaagtcaatactgtacgtgtatattaatattgcttcctccctgctgttagctagcctttcaatttaagtatagtaaatgctggaaattctcaattcgtaactcagttccctactttattcttatactcctactttggttctacgtcctatactaactaccagaatgaagaccgttatatccctttttatactggctgcctctgctattattacgcctgttgccggtactttatcccctgggcacttcggccttaagtctatcggcgctactaaccaagagtataataacctctatgtttacgcatactatataggtgtaggcctcaatgatgccgtcctgactaaggatgtgaatgccgctagctccgtttacttgaatggcataaatgccttcttcgatttgaatactgaactgctttggggagttgtagctaccggtgataataaatatatatgtgagtgcctgcccctagaaagttgtgtactaattttgatatgggctaacgaaaattccacagcctgggaacgaatcttgataaacgtaggccaaggaagcaatgtatttttagccgaaggcagtagctttatatggtcggaagccagcggcttcggtggatggctcggtaagaccccgttatcgttgctcttctctagaagcgatctcgtcctgatatttcgtagtctgtaattgttattacaatgcgccctagctgttctatttgaactgtaactacaacgccactatcccctctagctgcagtaagatctaactgaaggccgagtatatcaattagctttagtagaattgggtttgaccgctttctatagccctatttattgcctaatggcttatcttctactagtctgtagcgagttcgagggaaaataatatgaaagcgattactcaaatttgaataaggctagggttggcttctatgctatgcgaattacgctagctaaatgtcaggattctaaatatataaatacattaagagaagtaaaaggtggaatgagaagcactgcgttatatatggttaagtttgactgtctctaccctgggagcacagaagcagctttaagaagcacaaaagtcagtcccttaaaaagccgacttagcttccaaaatcgtgttctcttatattgggtaaccacagttacgttcttatggctagtttaatcagctcctgggttattagttgaggtttataggtctataactgggccttctgagaacgatcgaacgtcttaggtttgtgcggagctctggtgagggtgtcgtgtgaggactctcctcaactcttagaggaagagattgactctaggacttagaagtagggtagggttctaggagtgtagcagcttccaaatccattctatctaaacctaaacttagatttacttaggaacgtggtctgaagattctaggggtaaacttttagttgtacgagatatatagcttctatacctgcttttgaggtttatacggctaatttaataatctctacggcccatttagcctatgtacttaaatgttcctttgtgcttttagctagtcctgaatcttcaaagtcaagtgactctctacttcatagctcaattctctatttcattatcaaaattccagtataaaccataatatatataacctatatcttctaacccctaaaatgaagttcctcgcattcttttttatgctggctacctttgccatcgccgtacccgtcgctatttcgtcctctaagcacttcagaccctcagtgcagtaatctgagtaccttaaaatcaaagaaaatatgattgtaacttacgacatggtgctatacatcgtcatacatgataccggtcttgagaggggccagaatctgcttcgctatgatcatattgatgtcaaccctaaagaccggtggctcgaggatattttgatgttggtagctaagggtggacatttccctatcgcagacgggttcgcggtggatggcagacgaaatgttggcaatttgaaaagaccgttgtattctgtgcggaatgcattcggagggccattgagagtatgatggaataccacaactattattaatactctttggcgccgttaccgagaggaaggtttggtggtctctaagatatggtagcattaatttcagatagctcccgtgatatgcaaggtgggcttttctcggtataaatactctttgcatattattgaggtgtatatgggacagagtagctaagtgccatatatcttaatgcggtcttccatatctcccagttatgtattcgatttgctaccgtttcctaaaaagtatatattagatatcgcacaacagtttgtatatttatactcgtatttaccactgacgtatttgttaagaggaacctcaatccttttaaaatgatactgcagattcctgtaaatgtacactagagatatttctgtggtaatgtatagtctacagatttccagaacgtacgagtgcatcctgatttaatagacttagtgcttacggagcggaccatattgtagttattcaatggtttatataaaataatgtacagtaatcgccgtagacaccttacttgccagtattactagcacaaaagccgggctgacccgatcacggagctgtgtatatcgatgtactgggttccaagtgccaggaaagagactgttaaggaaagaccagtattgtgatgcatgccgtttgtggtgaatcttgaaaataaaaaccctgagttaatgtgttctgtgcgaatctgaaggctgatgaaacctgagggaaaggttcgtataaataagttgcggtctagagggaaatttgaatgggggtgagaaacaaagagtcgcgtcgctaagcttgtgtgacgaccagctcttacagtttactagtggtgaaatgaactaactggtgctggttcttttcaactcaacttcagatataatgttaaagtctatcactagccagccgttgggggtggtaaagctggatacattgcccctgaatgccgttgcttaccagttgtttcagcttcctagtattcaccattggttgaagtctgtaagcgatatatatacgtacttttgaaatattcgcagtagtttagctgtttccctctatgttttacttcttgcattctggctgcttaaaattcatctattgtggacgtctggcaatccagtaccgctgcgatctcgagtattgagctttggaaggctaggtttatcttttaatatggagattgcgggcgctccgaaagaatgtatgaggctttattatcgaatacagattgcctatatgaaatcctttatacttggctcttgaaggctgggtgtgtcaccagaaatcccctcagtattcaaagttagcattgattttttaccagtaatgtaacgttaattatgtagcattcagttcacaggagcgcaatattagccagcagagtaacacaatgaattatgccgtgtaagaaacaaaaagctctaatgtagtaagagaatagtaggaggggtgtggaatgttggatattggtaaagcctacgactaggacgagaatccgcgaatatccgagagtgcgcgctagatctttgtcccttagcaagatttagaaccggggtcgtaaatacaatttaagctagtggagagcagagctgctcttgcaaggaccaccaaatcatcgcttgggcggtgcttccccgccagtaggggttgctactggacattagcgaaacacgataccttgctagtaggactcacatttctcagcgatatgattgattctgccgtctcggtagcggacaaaaactccacagcggtagaatctattggccatcgctctagatcattcacgccaataacgccttgatctttgccaattttctgcatgagccgtatcatgatcgacggaagagccgcaatatatgctatttcagattgctttggcgtgcaatctatataaaggtccaaacttgctgcgaaacgttagccagataatgtaaggatgcggtcattaatagacctatcttgatgatcccgttaatgccaaataatatatcaccacaggccagtgattggtgcgtaaggccaaatgaagataagtagtaggtaccatccaggatctaaaatgtcagaacagcttatcgaagggcatgagggaccaacctggcagataatggatcccaattctgtctcgctaggataaacagatggaaaagcggcaacatgcgccagcgtcagcggcaagtcgtcaactaagaagaacgcgagatcttcgtgcatgtagcattcatgtaaggagagaacgttcctgttttctaggcgtccgaatctgtaaatcaatcttcgagcattctctttcctgtatgtccggatggctaccatgcgagacgggcgagtgcggcgtgtggcaattgtaactttgccagcattctcatacgtaatgactttccgataggtatcccacggtgactcctgtcttacaatcaggacggatgcgatattctccaggccacacaagtggggtaggcaaaggcttttgggaggccccgtgacaaccttcaatctaccgcggcggtgaggttctgttagtttcgtagtggccgccgtatgactctcgcgggtggtgggggccgacatcgaaatagggagctgagattgagctttgatagtgccaaggtcacatatcatattgttatctttcaataggttggataacatgataacaagacagtgttttctcgggtccaaaatgtgcaagaactaagagagaaagtggaattccatttgttttatacgcgcggtgttacgggttcgactctcagctatgataggagatggcagcttcgactgactatcgtaagataaggccgatgagccacagcgcttacatacaaactgttgacggcatatgtatctttttccaactaacaataagctgcacagccatcacgaacatgaatctcgagctaattaaggattccatacgaatcgacaaataaccgcactactcaacataactcaacttcctcggtgggggccgacatcgaaatggggagctgagattgagctttgatagtgccaaggttatatatcatgttgttgtctttcaataggttggatgatatgatgataagacagtgttttctcgggtccaaaatgtgcaagaactaagagagaaagtggaattccatttgttttgtacgcgcggtgttacgggttcgactctcggctgtgataggagatggcagcttcgactgactgtcgtaagatgaggccgatgagccacagcgcttatatataaactgttgacggtatgtgtatctttttctaactgacaataagctgcacagctatcacgaacatgaatctcgagctaattaaggattccatacgaatcgacaaatgaccgtactgcttaatataactcaacttcctcagaatcttgttacccttaacagcgctagggaatgatgtctacggacagattctaggtttcctatgaccgataacgcgccaaaaataaagagacggaagctattaagcgagccagagtctgcggcagcttctttgtaatggcggccttatgtttcgcttatgagtcaacgagcgcatcggatcagatatggtatggttattacaataattggtaggtctatgaagtggcaaacttgccagtgattattgcgttgcacagagttccacttatatggccatgtaatgatcactcgcaacttccatgcgaccagtatctagttgacgctgtaacgaccatgttggccaggtgaagagagataatccggtggacttatttatggctaggtatgcctttggcttggaagctcgcttttcagtagggcgagtcgctctctcaaaattctcggacgaatactggcacagctggtttgggcctcggcgttctagaattacctgtcttactaatactacagtttaatatagtctacaactgatgctataatgagtcacttggattaatatgctgacatttagactcaaagtgacagctaaactgccgagttattaggaccagcagctatgagctgattaacagaatagtacaaatatttcgatacttgtagggcacggagctattgtactattacgaaggaagcgggttgaataatgtaaggagtggctgattttgatattcgaggcaatttgacttgcgaaattgctatttctttattgctatccgcgattggccttgtacgcgctgtctgatttctctaatatattgcattaattggagattaagatgtagctggttttgtatatttctttcttattcctgagcgtagtgacatcgcacaggaaaccgttcaaatcctttgcacctggaagtcccttagtcatgtactgatagatttggagctcaacaggctcttaaatgccgattaacggttgtataacactataattgctcctcaagttcaaatgaccggttatgctatcaaaatatagccgataaggtaaaaagaacggggtgtgtctcagtcatacagccgctccttgtctgcagcagtacacttccgatacttctcttctggctgtgttggtggggaatcagaatcgggaacagcgtctgtttctatctctttccttacgataatctcttcgtacctgctctgaagcaattgggtggcgaggtgtatagtggcctactccctgggggaaatggtgtcggagatcaagatgtggtcggatagcgtttgtaggtattgaattgtcttgttgaccatatccctactaatctttataaggcttgggggtctctttggatatatccgttgtgagcggcccggtatgtgagaggtggagtatgaatgtcggcgtcgcttttgtgggagggttgagggttcggctgctctctttgttgcgttcagagggggcgggtcttggctttcagcctttatggcgcttggagataacgtagatccccttgagctaccaagagaggtactaacggaagtaactgcctctgtagctatagggccagtggactggctaacaggcggttgtaaaacctggcttgtgtggctgcgattcctgtggatgaataggccaacgacctgacggaagttgttagctgattcattgccttcatgaaatagatttgttagccgatggattccttgagaaggggatctaaaataacgataccagttttgcctgtacgtccattgtgaccttctgtgtctggggtattggacttctttggaacctgtgataggttgtgatctatgattggttggcttcgctggtgatggtgttgtactggcaagctattggagcaaaagaaggacaagagagcatcaaccgtgggataattatggccttttaaatgtttggggctgaagtggtcatgcccaccatatccacagttaagaatttcggggttattattatcaccgccgactcctaggagaactatggatgtcaatatgtggccacaatagtggtacgtacacacccacgatcgaatcaaggatgttttaatccagttgccgtatccacatggtgctcgagcctccaattgattcgaagcatattccgaggagcaacatggctgccaaatcattgttgctcatagggcgtgtggaagggagtcccatttctcacgacttgggggttgatccgactggccgagggtgttttgtgcttccaggagctctggagactttaacttctttggtcataattcgttggtactgtgccgacatgatagtattttttgagtgttctcattcaagcacctttggcaatgtacgggtggtgaatgatgtcagaaagttgaatcaacgttcacaaagttgaacataaaacacccttgaacaccagcagcatgtgagttttccgcctgtagaagatatccatctgagccatgttgtttctttgccaatactgggacctgattaagttttccactcgaagctcgtttcctaatcggccgcgttggttcacctaacggcgacggtttaccatggcttagagacgcatcctacactggctgttaaacacaagctcaacaaaagagataaaaaagagatgactacatctttctggggactgttgggtaggtttgcaatcaacagcaaaccgcagtttcctcgagtacagcagagtgatatatcgcaaacagaccaaggcaaactacgtcggtatcagacgttcaaatttgaaagatgtcacgcgtaaacacgacacatattaaggaggttaataatatagaaagagacgctgtccgtggttaaaacgggcagatgtagattgccaccacgttgagcgatttgattgcaaatccagcgttatgtagaaggaatcttttttttgtgcggtgttgctttcttttcaacagttgatggaagtggtttaccacgctcaacgcacgattttgagaggaatgattccaggtcgagacatgactatgggccacaaggtatccaaacaccatttcaacgtcgatcgaatcatctcaacgcctatcaacgaggcagtgattatcgctaccatctgcgcaactggttccatcgagagacgtagcggaaaaaatataaaaggggccggatgccccaaaaaatcaggacttcggtcctcacactttgatgcatcatagtgtccctttcttgtctgcaggcttgggagtctccgtggccatggctgtcgctgctttgagccccgcgacgttagaaaggtgttttgcaggataaggtctgcgttaaaaccaataccagagcctactatggtctacaagcggtgccatattggtttatctgaatcaatatgcggacatttagacacagaatgaccgccaaacggtcgagttgtaagaaccagcagtcatgagccgattaacagaacggcaaaaatgttccagttcttgtagataacacagcacaaaaaattacatctctacgagcgaagcggattgaataacccaaagagtggctggttttgatacacacacacacacacacacacacacacacacaatttattaacgcccggcggctaagccgaaagggcaactatctctgatctactatacatgtcataatatatatagtactgtgtctcctcagagcccatacataaagccttgcaatatatgtcatctcagatgtccgttagtaatttttgacggcatacagtgcgtcccgaaactggtgccaccgctacactctttcgttgtttctcgaatcacaatgccaagacccgctagtctctgtttgggaatttttccggagtacccctgtcagttgggcgtgtattgcttcttacgtaggttactactttcaagtatgtatttgcgtgtgaatcaatacgtctcacccaccttcaaaataaccacccgacggagggtatcttaacgatcaatcaccagtggttgaatcaagatgaccccaaacctagctccctcaaagcaagatcttatttatgacatgatacacggtggggagctgtccataccgcagatggcgcaggctgctggctgcaaataagagtaccatcctgagaatctcttccaatatacggatgtttggcagcgtcaaagcaccgcttaataaaggtggacgacaacgtagcatcactccagtcatgcttgaggcgttgtgcgatcacctgctcgaaaagcccaccttgtacctcgacgggatggcgggggggcgagccagcacgctcgcttctttccaagataatcggtcatacagctgccgggtgtgtttgcctgggagtgctgcatcaactcgttttgcgtgttccctacgttcgctggaaggtcattgctgtggactgcttgggaccgtgcgatattcagtgtagttgacttcattctcgggacgctttcttgcgggagagcatcttcttgtgtcgcggatctggcctgttctttagccagaacgcgcagtttattgtcttcgctcgtagagatccaccggatattgatctggtttccatttctccgtagctttctcatcaacttgtatagttggcagacgaattcctggcctgactgttgtcgaggattccttagtgtcagagccgccgctttgttgctcgtgagcagcgtaatcctgtaatctttcagtccaactaccatgttcaatgcatgtaccatcgctgctagctccgcagagaacggattttgctctgttcttgcacccaatgtaacggaaagggtcttcagtttcagttttcgataccgaggtggctgcctctcgatcgccaccccaaatccgaccagctcgttccgtgccgaactgctggttgcgatctgcactaacccgcccggtacggtcggtgactgcggagtttcttcaacgccatcctgtacgcgtgcttcccatggtgccaatgtgaacggattgatggtttccagtctttccatctcaatgttcttcagcgcgtctgctacttgatacaacggcgaacgatggtatcttctgaatttcttgatccgtgctgtattcctgcggagagggttggtttctggcagggtatgtatgtccgtccacatcttcacggctcgtctccagaagcggtgttgaacagtggcaaggtgggcctccgcctctgctacactggtcgcaactgtgaggaatgttcttacaatcgcctgcgctcctaccctttggacgcggttgatcgaccccatggccttatctttgcacgcgtgcatccagacattagacgcgtagtccacgaccggcgccaccgtcgatgtaaatagctgccgcgctgtcgctggggataaaccccgaagtcgtcgaagctccatcgcggcctccaggcccttggatgctgccctcgcaatatgttccttgtacttgagtttcgtgtccatgaggacgcccaagatcttgacaatgtaaagtagtgaggttctgatgatgcaaccacttccaagcattcaaaaagctctcttccagcccataaagtccgaaacgattcgactgaataccttggaagaaggcaatcttttataccgtcaacatggacgctcataacttagcacaaattgctgcaatctcgtcgtcattttggctgtcgggtatgtgtctatcttaagaaaatacagaatactaagtatgtcaataacacaggcgaaatattcacctactcttggggcgtagtgcccgcagtcttggaggcctgttcaacctcccagcattttatcataagggacattcgctagggccgcctttcgccatcctgggagcagggggctttgtatggttggctttggagtcgggttgttggttgtactggcgggctgcaattctcgatgttggtatcgttccatacaccttcgctttcgtgatacaaacaaactcaagcatattcgagattgcgaatgtgaaagactcgtcggaaaagcccgccagtgaggagaaccggctggctccactgctgaacagatgggcgtgtcttaatactgttcgctcgcttttcccattggccggtggtattttgggattggtagcagccttgtactaatcttgttgacttcctatgctggattgaacaaccgagtcttgtttcgttagagacaacctgccataccgctcacatcaaaatgccaacaatgtcccatgtccataattatcttagcatatcatgcatagtatgtgtcgtattggctttctgcatccaggaaaacagtgtcacaatccccttgtccacgggagtaaggccctcgattccacgcccagtgtcgaaatcgtggacatacaaaatgacgcgcaagcgctacccgtccactttctagatccagggaccgctgacatggtgtcccgacggggcgcttttggctggctgtacttgggtgacccaaccacccattttccacgcgcagtatggacggtatccctcggatagcatatctgccgggccatctggggggtatcatgtagctagctttcatactagatagcaagagcatccccagtctcgcgaacgacggcgtgggccccatggtcagcacatttattcttcactttctatagtatatgacgaactgagagagtggtcaaataccatgggccgtaaaagctgtacctcacttcacttcgattgttactcatctacagtgtgttgagaatcaagcattctccaatacaccggtggatcaatgccggtttcagaagccagcttgcaccttccagaacattgcggaattcaatccttggacttggtaaactctactactcacactctaggattgtgcaatgccattattatggcgtgcatgctactaagcttagcgaaaataaaagtcggattattcctgtattctagacttaagacttatacacatttccaatcataccatatacgttcttgaatctcattgagttcacacctctggttacacgtagtattcatccgtcttgtaatactttaacagagtgagctgcacatgctcttaattgatcccggatagatggaacaggagagcatgtcagaacccaccctttgaccatccagtggacaattaaatacaaattgagcccgtgctctactctagcagcccattttccctacccctcttgcccccaagttggaccgttatgccgagagctcgacggagatgaccccgattaggggccagtcctgtagttgtgcgtgattctcacccggcttttcaacctacttgttgttcaatcatccttctcacctgggcgacacccacccgactattggccgcacatgagccacacgccggtgagttagtagttgggtgggtgaccaccagcgaatcctcactgttgtatgtttttcgtttttgtatgaaaagagatacacgcttatgttatcctgaacgaaccttggcacacgggaggttcgcaacccagaaataggatcgtcttcttacttaagaatttatatactgaagaggggacccctgaggggcaccgacaaccctgcctgcgaaacaggtgtgagaacagagtcatcaatgggagtagtagggtgctagagaggagaacaccatggggtgactaccgagaagagaggcggaaaggtgtctgcgttgctatctaggcctcgggagtgcttttatgtcacatagccgcttagtcattctgctctggaaacccccactgcaatacatacttcaatatatatatcacgcgataatgctaactacgttctatagtttatatagtatcgctatagttatacccgaacccactactaagtacgaggggacctaaaacatattttaagtactatgcgtagactaggcccgcggctgtactaactcaccattatgacccctagattgcttgagctagacttattgtactgggcgatcagtaagtagttctttgtgcgccatggcttaggtctgttcctataaagcgagtcgaaaatcaatagccgaatcctcatctcgccatcacctttaagccagaagatagtgggccagaaggtagtgtgcccttaagtgcaacatattgccgatacctcctgtacagagatctgcatcacgtcttctaagggaaaacccttacgtcatgtcatgtctctatcaatgttcttgcactagcagggtagcttaccatacatcttgcgagccaatcaaaacattaacggcgctacagatgaggaatatcacaaacaaatggttttcctctgtctatctttggccgcgatctaaaaataaaaccagaataaataaatcaaaatcagataagactgacaaaaatgattcggcgacaagcggggtagtctaaagacagaaacttgtgataatcttaattcttggtatatagcaaaaatatttctacactctggtgtgcaaggtctattttctctcgttgaatctttcgagacaaaacgtaggattttctctgtgaccattgaaatatcaaactcaacctccaacgccgcgggacctcctctggcgactgatcatatgaggctaatgagagccacgaacctttggggggcccacataccaatcatgcaccggttatcccttcgcattatgacatggcttaagatcattccagtggcgcaagaccatgcgctgatcttagcttgaaataacccgccaatgaagtcgacatctgaccattgatgggactggaaagttcgccagtcggcctttctcaatcaagaatactaacgcatcttatagtgctatccagagggaaatggaaaacgaatcagcagatgtgaattgctacctacaatgtctaaaactacattttcataggtcggttgagaggaatggcccgagtaacaatcaaagtatgctaaaataccttcgcagaaggtgaaacgaccctaacattagtgtagttacatcgcatattagttccgtttcccgaaatatcattttcctccgactaaaatatatatatagccttctatcctgtctaaacaacagggtaaatattttacaattctgcgtactggcaatatccactgatgtcttcattaatctttgaaaagtctctccaatgtcaacctcacgattttttccggtcccaaccgcctatagggccttttcgcaatcataatgcatgctaccttgctatccctggtactagtcaccccaatagcgggtgcgatgaagccgctgcaatgaagctactatatccaaccaagcactcaactaaaagcaaggtagaggtgaaaagaaggaggcacctcattgcaaaagtcgagattatttcgcaaattctcgtcgcaaaagcgaaggaagcagccgaaagaaaccaccagaaccgtcaagccttgcggacgaaactagcaccagaactcaatcaacgcaaacggagtaaccagttgtcctccagcgacagatctggtatgcgtgatatggatgaaaattttgaggttctatctccacgagatgtcagatccttctcattcatcctcgaaccaaccacgaagaagcggttttgtcgaaagaagatcgaactctggttgccgaaaaacccacacgagataacgatggacttctcccgtccaggaatggcacttcttagaccacagtctttgacatatgctacttctgggcccgctaagcagagcttatcatctaagaaatcctcaactaccaaaaagtctgttttgaacgcaatcgcggagccacgcatttcaaccactctgttcattggtgaaaccacacagtctggttaccagggcaagaaaaagcaagcggatttgggtttgtgttgggtgaccggaaggcggtcacccatgtagacccagatcaccatcagatagttcggctccctcttcctctctctctctcccttgtccacttttatcttagcgaatcgacaatagttgttttccccttttcaggcacaacgtagtcagatacgccattaggttatgagcacttgtctctagctagcaaggaccgctagcaacctccaaccctaagtctctttcctggaccccacttcccggcgcttaacccgcacaacgcgcgtttctcgccaatcggatttaatcctcgcaagcctcaatcaacaacagaattggcaaaccagctctcagcatggctgatagcggtgtcgactctggggatgacaacccgaataatcagtcacaatttttgccatcaggcaataacaacgcgtctcgggagataggaaacacctctcaaccccaggccaacacaatgtcatcgggtaacggatacaacgagaagaatcaggccactaacttacctgacatctcggctgcgaaaatgcagaaagtcaaagcactcgagtacaattccagaaatcctcgtggatgggcgatccctgtgaaattcgctctcgcgccattgagactggaatatgtcattgacagcagcatgcctcgccccactgtgggtgacccgaaatttgacagatgggagtactggtcacgcacagtggctagctggctgtacgttcaggttgacgatacactccaagaacgaatccagaatctctcgtacctcccggaattcgccgacacaatgttcgatgaaatcatgttaatggtgcaaggctctgacaaggccgaaaatgcgctaaacgaaacaaaaaagttcgacgaaatgaaacgagcggacttcaacactgcgaaggaattcattgcggaataccagaaacaataccacgttctttcgcgattcaaaattcaaccacacccttttcacgcactatcacaagttctacggcaattggataaagaaatatccaaggttcaattcatcatcgaggagattagtaatatcgaacctaagaaaatcacactcgaaaagatggaccaatattgcaagagcctccaggcagtttccgacagagaagggactgctaacgcagcccagtcctcgaggggacggggtaacaaccgcggcggaggacgcggaggacgaggtggtaagaggggcggcaaaggaggtaacagcgaagcctcctcaagccaagacaacaaatcttcgaaggatgactcaagtacatccaacgaacccaagaagaagaagacccttcgcaaccaaccacctcctggtaaagatatccatgagtatgtcaaggaaaagaaggaaggaacacaaagggatgagagcgggatgtgtgcctactgcggtttcgggccacacaaagctcaaaagtgttcctatctgtcagaagatccacccgcacactggacacacagcccacacgtatggaattactcgatcgcactgcgaagcgaggggcgaagcaatatggccataacggcaacagctcgtcacacagatagtttcaacagctggctgattgacaccggatcagacaaaacactcacccacgacttcgaagatttctacacataccaggaggacagcccggaatcggcatacgcctaccgggactactccggcaacagagtggtaactgaaggacacggagaggtccttgtcaaagcaggtctcgaagacggaacaacatacaccttcctgacaaaaggctactacagcccaaggggtcacggcaaattgttcggcatgcagaaactcctggaagaacaggatatctcgtatgacacaagaactaagcgacttacagacggcactggaaaaaccgttggagttgcaaacacatcactcggggttccgtacctcatcggtcctaaagaagacgattcacacgaagaagattcatcctacgggtcggacagtgacgaagaaacaggattagtcaataaaatttctgcctttgaggcgcatcgacgctttggacacgctggaaaagccaaacttacttcaacgctgaaacaagcacaagagcttgacgacgaagaacagtatggaacagaatacttcgactgtgaagcatgttttcaaggtaaatccaagaaacagatttctcgtgagccgcaatttcgggttcaggacgtggcatggaaatttcatgtagacacgcagcctatgaaacctgagggcccgaacggtgaaaagtactggatgcctatcctcgacgacgcaacaagatatctcgaggggccgactctcacgaacaaaggtgaagcatttgtcaagcttcaagcattttgcgaaaaaatcaaactccgaactgggcgctaccccggaatatggagactcgatggtggaacagaatttaagaacttcatcacttggggcacaaaaaagggaatgactttcgaagttacaccaccctacacggcagagcccaacggcgcggtagaacgcttcggcggatacgtcaacgacattcagagaacgatgatcatcgatactaagctacctgaggagctgtggccctacgcagtagaaactgcaatctacaccatcaacagattaaccaacccaaagtctcaaacatcgccactcaaacactggcgcacagaactcggaatcgacaacccagatccgtcactgaagcacctcagaccatggggaacaaccgtctacgttcatattccgaaggagaagagagtacaggcacgcaaagccgctccaagatcttggaaaggacacctcatgggttatgagggggataacggacatattctaaaaatctggaatccggaaactaggaagattacaatctcgagggacgtcagctttcctcaaccaggggacgaagatcaggagggaggagtaccggtagcgccaaagccatcgaaacccccaggagatgacgacacaaacgaaatttccatcccgctgatcgacgcagccagaaccgaaccaaggacagagattgtaacagtctacagacaggatccagtaaccccgtcaacaattcacttgcccacaattcaaggcagcgtttcaaccataccagagaccccggtaatgcctcgtcgacagaggctactccctgcaccaaggcacacaagatcgatccttgggagacttcagagagggacaccaattcccaaaaacacagaacagttaacagcgcaaagagtcaaccagactcttactccaatccaagaggagacacagactgttcacagtgagaatgcaacccctcagacggagcaaattacaatgacagaaaagctagcagagaggaaagccaacttccagagaagacttgaggaactcacagctagaatcaacgcagaagagatggacatgctggaagtacaccagtacgcagactcgattgaacaggacttgatcagggaaaccagctccccacgagagtcaactccaagggaagacactccgtccccagaacagacaaggacagagtaccagtatcctttctcttcaccaactcaacagactccagaacgcagtgaacaacagatagctacgcaacaaacatcaacgcaggacacttatgaagcgcctcggcacgctgcgcaactgacgcagacagnnnnnnnnnnnnnnnnnnnnnnnnnnnnnnnnnnnnnnnnnnnnnnnnnnnnnnnnnnnnnnnnnnnnnnnnnnnnnnnnnnnnnnnnnnnnnnnnnnnnnnnnnnnnnnnnnnnnnnnnnnnnnnnnnnnnnnnnnnnnnnnnnnnnnnnnnnnnnnnnnnnnnnnnnnnnnnnnnnnnnnnnnnnnnnnnnnnnnnnnnnnnnnnnnnnnnnnnnnnnnnnnnnnnnnnnnnnnnnnnnnnnnnnnnnnnnnnnnnnnnnnnnnnnnnnnnnnnnnnnnnnnnnnnnnnnnnnnnnnnnnnnnnnnnnnnnnnnnnnnnnnnnnnnnnnnnnnnnnnnnnnnnnnnnnnnnnnnnnnnnnnnnnnnnnnnnnnnnnnnnnnnnnnnnnnnnnnnnnnnnnnnnnnnnnnnnnnnnnnnnnnnnnnnnnnnnnnnnnnnnnnnnnnnnnnnnnnnnnnnnnnnnnnnnnnnnnnnnnnnnnnnnnnnnnnnnnnnnnnnnnnnnnnnnnnnnnnnnnnnnnnnnnnnnnnnnnnnnnnnnnnnnnnnnnnnnnnnnnnnnnnnnnnnnnnnnnnnnnnnnnnnnnnnnnnnnnnnnnnnnnnnnnnnnnnnnnnnnnnnnnnnnnnnnnnnnnnnnnnnnnnnnnnnnnnnnnnnnnnnnnnnnnnnnnnnnnnnnnnnnnnnnnnnnnnnnnnnnnnnnnnnnnnnnnnnnnnnnnnnnnnnnnnnnnnnnnnnnnnnnnnnnnnnnnnnnnnnnnnnnnnnnnnnnnnnnnnnnnnnnnnnnnnnnnnnnnnnnnnnnnnnnnnnnnnnnnnnnnnnnnnnnnnnnnnnnnnnnnnnnnnnnnnnnnnnnnnnnnnnnnnnnnnnnnnnnnnnnnnnnnnnnnnnnnnnnnnnnnnnnnnnnnnnnnnnnnnnnnnnnnnnnnnnnnnnnnnnnnnnnnnnnnnnnnnnnnnnnnnnnnnnnnnnnnnnnnnnnnnnnnnnnnnnnnnnnnnnnnnnnnnnnnnnnnnnnnnnataagaccagacatcagattcgccgtcacacgcctacaacacagactagcaacaccgactttttctgatctcgaggcaatgagacacgtcgtcaagtacctcagacacaaccctaagacaggactgatctttggaaagtcggacgaactacaattcatagcattcacagacgcatcacacgcagactggacagactccaaatcaaccgaaggatgtatctggttctttgcgggagtcccagtagcttggtctactaaaaagcagacgatcacagcgaactccacaacaatagcagaatggtgtgcgctcgaccagccggcccgggatgctatgtggcttgctaaggttgcagactcactgagcctgccaagacccgatcccacagttatctacaccgacaacatcaattcacagttgctactgacaaagaagggaggcaagtctgctaccagatggctggcactccgatggttcttcgtgaaggacgccgtggcccaaggacacataaacatcctgagggttgacacaaagcagaacgcggcggacgggtttacgaaggcgcttcccaaagagcaattccgagctttcttgaagcttattgggatgacttaattcaaaggaaaatttggggttttttacgactaccacgattacgacattttaagatcatcattttcaaaacaggagatatgagatctgtaggggggatgttgggtgaccggaaggcggtcacccatgtggacccagatcaccatcagatagttcggctccctcttcctctctctctctcccttgtccacttttatcttagcgaatcgacaatagttgttttccccttttcaggcacaacgtagtcagatacgccattagtttgaacgaggtcaatccaattcaaaaattcaaaccttacgcgtcaaaaaccatcatccgaaacctatctgagagtcttagggaacttcttaccaagcctctctcaaaaagcgatttgaaattcaagggttcgatatatgtcttttggcaacaaggcaattttggatacctcaagattggacgctcggcaaatgttcgtcgccgtttcaaggaatggtctgatcaatgtaagaaggatatgggaattcactttccagacttcacgcgagagacaagtgatggccagcgagttttggaagaggtcgcccatatttgtcgtgtcgaggctctggttcatctagaactgttggagcacagaaaaatcgaagagaaatgcccaggctgctctcggaaccacatagagtggtttcaagtctcagatgaaaaggcaatagccgttgcacagaagtggatggcttggatgagaacggaaccgtatgagaatcgaggaacgggaggtgaagaaaaatgggtgctaaaagccagagaaatggagcgactaggagagcttagtcaacctttatttcccaaattggccccagaatctcaggttcgggaagaaagactggcttctcttcgccctagggcttcctcttcaaccccatggcgagatggaaagaacaaattgggacggatatcaatttagctgatacttcacaatttatacttattgaacccccgattatactgtgctaattttatatgtaagattagcgggttttccaatgcttttgttattaaatagtatatatattatctctctctattagctgccaagtttgtcttctctaaccatgagatattaaaaaccatgttccgcgttgatataagaaaccaatatatataggaggcatccttctactaagagtaaaagcctagtcattagtacgagttttgtgccaacgcatagttgcattcttcagcgcatgcgtgtggcaaagcaataggagccgtcatatcgtgagtattaggtacctatatattaaagcacgacggcagatgaagcggagttttgtttgatgggagctagatatcgccttccttcgactagacaaaaactcttgctcaacgcgaattttgaaatgccaccattttctatattacttttctacctactaacatgttttaaagaacccaagattcagagaatcatttagtaaatgatcttactgcctataattctagaagaaaaattaaagatcgcgctattagcgggtgaatttgacattcctaaatgactcctacccgccaggtcaaattatcgggctcctcgttcgacgcgctacccaaccaattcaattttaaatacgaaatctacatcgctagtagtaagtagaacacctgcatcaccttattactaagtgatttaggtatcccgatacacgttgtggtatcgggatacctatttgcatatcgggactagtatccggaaactaagtgacaagaatatggaggtataactgatttcgaaaactactgtactacagtacttgatttgttactcttaaccctaccgttgccgagctggcctatacagaatattttcttgatttaaggattcagtgaggcctagaatcagtgccagatgatatatggtcgcagcttccatgctcccaggcacattattgattgccatcggaagtcgactgcatggccctggcaacaactaggttcgagaggatgcgggagcatgtcaaagttatctctcgatacaattataagcaagcaatttacgccattcgaagagacactactttaactacgggcatagcaatatatacaagatacaacgaaactatcttctggcctatcattcttaagtacgccgcgctgatcgacctagcaacgctactacccgccaagggcccagctaatagattcactatagcggaaaaagctgctacaaagaaattcatggaggacagtgggtatagctttgggtatagaaaaccagcgacagtaccactttttctagaaaaacatatacaatatgcgtaaggctggcgtttacaaaattgtcttctagacataagcacttgacgtgcatatctaacgctatgaccatctaggcgcagaggtcacctgactcaacggtaaggatgagacataagccgtgttactatcccacccacgactctatagttctcagctattatatattcccttacagtgctgtattaaatacatacgaccatagggtgtggaaaatagggcttcccgtccgctcagccgtactcaagccacacgccggtgagttagtagttgggtgggtgaccaccagcgaatcctcactgttgtatgtttttttcttttttgctccaaatttggactgtagtagccggtagtaaggaatgtgtacggtagaagtcctcaaaactgtgagtaggtgttttatcagacccagtgtcgagtaaccagctgttgaatctgtccgaggggtgagctgccgctgtgatggccatgtaactctctccctcacttcgcagcgcgatggagtaattccagacatgggggctgctggtccaatgggtgggtggcacctctgccaggtaggaacaggctttggctttatgaggtccgaaaccgcagtaggcgcacattccactttcgtccttttatggcgcgtccttcttttcttttacatattcatgaatgtccttgccgggaggaggttggttccgtagggttctctttttcctaagctctttggatgtgttcgactcgtctttcgaagattttgttatcttgagtcgaggaggtatcactgttacctcttccacctctcctgcctcctcgtcccccacgtcctcctccgcgattgtttccccgtcctcgtgaggattaggctgcattgatagttccttctctgtcatggaatggcctatgtgtcgggtagaaattgccgcaagatcagagattgtacgaacgtgggcagcatgaacttcattcatagagtacggagtagtctcattctggagatattcacatgatacgtgtgggatactgtcagtatcgaacccgacaccatcaaccctcttgagtgtatcaccgagtcattatttgatttatcatattgcagtgatgtctccaggcttttcaattgaatcgtttgtagtcaacaacctcctaaacaacgactgcggaagagttgaagacagtatctctgttaaagatcatgtagttcgacatgtaccttgcgagtccttgacgtcctttccaggtggctaattcttcgagtctcctccccacatcatcacctgcacagcttgagctctttgtaaacccaagaatatcatctacagcaagatgaacttgctcgagcagtctatcaccgctaaatacaagttctagtcagccctgcgtacctcgacttaagtaattaccattggggaactcacgacctcgcttcccggtcgcggaaaacattcctccaatgagcatacgtccatacaatgggcaaatatgaagcgcaagttgccccacgggtgatgttcagcagtctttcggccgtttgcattgacttggttgacagtcgtaagggaaactgtgttcgagtgcaccgtgccgtcccaatgaaaaactcgcgggtagaatggataatcggactgctggggatattactgtattctagcgtacgaggtggctttcatagtatgtgattctttttctgggtctatgagctggtaggacttcatctggcttcttgggtgaaacttgtgatatttgacaggtgcgtagggttgatgcagtccttcgagaatgttatcggcatgtctgttgatccgtaatgtaacctcgtatccgcgtgagttttggtcatcttgtacctggtgtaacgcgttgtcgttgatggtcacagcctagtcgattagaactgctagacagagccgtaaagctatatccccatgaagcctaccgaagccaaattcagctgtagattgggttgggagtttaggattctgtgcctaatgatggtgttgtggcacagccgaaggagggaactggaaacaccctgaggacgcagtgttatccaaaaggccttggtctggcggttagttttcatggtgaagacagttcgtatttcaaggtgtttcatcaactcacttttgagattctgctagtagaataattttctgtctataatatatagaaatatagaaatatgtcacatattcagatcccttatgagaacccgacaagaaagttaagagggaaggacgattaattctctacagacaaacagaagctacttaaatagctagtggaagcccgacaaatcaggcatcaggtagatgcgctcttaaacacaaacaattgtctatgaggtcactgggtagacacctaatataacgcttttcggatgactttggctctaatgaaaccaatatatcgatagtccgactaaagacacttaactcaatacttggaagtaacacaattcaaaagaccaaagaggcttattttcaattatcaagcaacggagccacctctaaccagaagtaatgtcttatgtgaatgagaaaaaggcaacctccactaaacacaaactccagcgcaaaataagcgagcaaatggacaagtgatgctaaataaccaccttgaaagaaaaaaggcgtcacgaaggcaaataaacgaaagtcgtggacctcataaacttcagcccgcaaaaacctgtctgtacctatggtctcgctcgaacgcatgcgagtcatctgcgaagctcgaaccctaacctatcttcatcattcggagattagagtaatgggctccggagagaccgacacactcgcgtcggggaatcggtccttcagcgtgaccatcagggccggcttatcccacaggaaataggctttctggtcagcccagttggtactctctgggcgcagggtgatatcgaagtggtagaggagcttgcagagaatgagtcggatttcgcagtttgctagactattccaagtgagaacacgttagtattgagtgaaatggtgcaatgcgtatacatggaagaaacgcactgtctcccaaggcagacgcgtggaccgagactgaatggctgcaggacatctttcttatcgtccgcaaagatcgggtcagatcccagccagcgctctggcatgaacttatccgggaaggcgaagttggactcggagtggtaggaggcgtagtggtggcatgccacggctgtctgatcgggattagtacgcaggctccaaccgtaaaaaagtgaattgaagcctatacatacatcttcagggaggaaatggccgttcacgactgctccgccttgcggtacaatgcgcgacagacttgtcacgaagggcggatagatacgcagcgactcctcgataacagcagtcatgtacttcagttcttccacggcgcggaaggtcatataactgtcctgtttgaaagtcgagcggacctcggcgacgagttggctcatgacgtgtggagctgtacacaggtaaaagatacagccggatagtagggttgcggatgtctcgctacctgccacgatgagactggtattgggtagcgttagcacaatataaacagaagagaagaaagatgaaagcattcgacaatgaaaacactcacataaaaccattagaatgaatctcagcccgagtcataatacgctcgctgtcacgatactggcccttctcctcgctaagtccatgctggagaatagcagtcataaaatccggacgggccatattcgactccaagcgccggtcgaccttgcgcgcactcagatcaaagtgttcctggccgacgcgcttgacttcccgcggaatgaataaatccaggaagcccttgagcatggggaactgattggcagctccaataaaagcaatagccttcatggagctgaagatcaacttaatccacgggtgaagctggctgtccttcaggcagtcgaaggactcgccgaacatcaggtcaccggtgatatcaaaagtggtaaagttcatccaacttttgacatcaacgatggacgccccttgccgaatctgtgaccgcagtttggtgatcaaggtatcgacatagcctgtgataagaccttcttgatctctcaatgccttctcagagaaggcctgggctagcagccgtttctgtcttgcgtgggtcgcattatccaccgcacagaccaaatgatcgaccccattcgccggggctacatattggctccgattcttagggaaacaaccgccaggtctggcaccgtagatatcgcgaaaggcctgtgctgtgttgaaggccaattcattgggtccaatgcgcagaattggaccgtactgcttgtgcagcgccagaatatctaggtgattacggccacggagaatggagacatttgatgggatgcgagatatcgcccatagctttggaccggggaagtggcgcaggggcgaccagcaaaaagtgtagatgatgctgtaggtgacccagagcaggagctgttcggtgctgattagcgttggtttctctgaaaacgcctgtagagggcattgctcaaagctgttgtgtttccccggggagatgtagggattcttttcttgcatgaaacaaacgagggttgggagtacgagttgatgcaacttaccaggcatcctgcagccgcgccccaaaagccagggcctggggttgcccaagacataagatttgaggtgaaagaggtgatagagatccacagggtcatgcactgccctgaaaccatattcagttcagggtcatctggtttgttttctggatagaagtgggatttggtaaatgtttctcctttttttcatgatttcaaatagtcattgggcactgaaccaaggccaaagaaaaagagaaacgaacaaagaaaggcagagttgcaccagtcgaatgcggttagtgcaagatgcaaaggtgaaagatcacatcgggagttggtgaaagaacccggattcccagccatatcaaacctatctacactcttgtttggactccgaaaatcatcgggaaccctagtcaaattgcagattcgactgggaccaacacggcttccgaccgtaaacgacatgcaatttgcagtacgtatgcaccgcgggattcttgagatctttgcgcacccccgctaggaaaacctgtgtatcattattcgaccatcccagtacacgagtgaaaagagccaacgagtaggattccaccgccatgagaagggagcattggttgtaccgaccaatctccttttgcacagggtccctagcccaaacactcgatggaacctagaaaaaaagacagtcagtcgcgataaaacaggcaaacaaaaatcaaaagccaatcagacaaacgagcgggggatggtcgcaccttgtacacctcatctcgaacatcttcaaaaccagcctcaaccagccgctgtcggtgaccttcggcgatattcataggtcggtgaaatgcctcgctggcctgagttagtcgttcaagaaactcacacaacgccggcgcaagacggatcgaatcatcgtccgacttgagcatgacttcaaactcctgcaactcaacccatccaccaggacgcagatgctcgtagctctggcgcatcaaccgcggccagtcggcaatagcaccgcctaaatcccgggcatggatgaagtcaaatggccgacttgggctgtacagccattgcgactcggcgtcgtccaccacaaatcggaggtttggtgggacccatgacggctggatgggacttagatcggtgcctgttacctcggcactggggaagctgtctgcgaagtcgatggcccagattccggtgccggtgccaatatccagagcgcgttgaatattactatccagtggtgctcggaagagccggccatttagcacgaggttccgtacgtggtgaaggagatcttgtcgatcttgttctggttcgtcatttggaaggacgtagtggccttcgcggtatgagtgataccgtcttccattttcataagcgtagtttttcacatcggatagcagtgaggctgtatagctggatgtgttgtctgattctccatcaaagactgagtctgaatccccatttgttgatgctgcagatgatgtgtctccattgtcatcattatcgtctggcgataaggagtttacgggtagagatggcgcggaaccactgtaatccacttcagaaatggacacggttgttgcgctcattggagccggcggcaaagaatgcggtgttggcagatcccacgttgagctcaactaatcaatttcagtggctgatgtagttaatccaggcaagggagtcaggtactcctcgtcactgtcctcggaactttcctccggaattcgtgccagtccaggagacgggagaatctcttcttcgcgatgattgatatcggcctcaagcgcagagtcgtccaacaatggcagctcaggtatatccggcaagccagatgcacgaattaccggcgctcgaattgaaggagcaggcgacaatcgcctgactgaagcttcctccattgcagacgccatttgatcaaaagtccgttttaacgggatgcaagggacaggtaatagcccagcctccggagctggaattcctgatatcattttagtggaattcggcacggcgtcagacgacacgattggcgaggaatcacgattccctgtcaaggctaggtacgtgtgagaggacaatagatcggtacccagatcaattctcgtgttgcgtcgccggtcgtccaagcacatggggtaaatacaaaggaaatcaatcatgtcaagaggaggtagccctgggccaatctatacagtaaagatatctgaccacagtaagcaatggaatacttagaagatcattggggagaagggatcagataaatagcaagtttattttagcaaagagcttcacttttcatgagattgtctcctttcccatggtatcacaaggaatatcaaaagggaaagtgccggagtatatggccaattctaatatcggcaggggtttacatagtacgacaatcacactacggcaatcgggcttattacctgcagaaaactatggccaaggtgtagatcctgaagaaacccgggattttgtattgatataactagactcatctcgccccagtctcgagtacaacggtttgttcaccactgttcgtgcatgagtttattcggtgggatcctgatgccccaacacagagaagaagcacatattcaggaatttcgtattttgatatacaaaaatcatgacatagaagacgtatgccaacattcaataccagttcacgcgtgctgattcagctttggggaccgggcatgtaacagtcctggctcgaattcttggaaattgataagattcaatgtggtatacattcaatcaataaccaagctaggccgcgatgcgtgtgggatattgatggcatttttgaggggtggattcatgcacagagtttcgagatggtacccacgtcccacacatcgccggtcaacctctatcgtttcagcaggattgaagctcatgtttccgggtcccatcgatgaaagcatcgcatggcgataaggacaacagttgtcaacatgagtgacagtttataagacaatgccatggctttagatgagcgactcgcttggaaggtgcagccgaatgcctgcttcatctggggttggcaatctcattggacaacttcgcttgttgatgatgagtatatatatatatggcatctcgatggcacgaatgatggatgatggagagaaaaaggttgatatcatatgaaaaatgactatttgtaggccaaagagacaatcagagacaaagaacgagcccttctttattggaaggcgttagaaaaggcggcaatatatccatgcagcaggccgaacgaaccctagtcgatttttaaatatttctccgaatgtgtttgcctctgtggacattctatatattttaagatgcctttctagtataagtgccctgtctatttctcatcgaagcgtagcactgcccaggtcattgcgttgcacaggtcggcggaattgatatcctgtcgagggttggacaaggtgagaataagatctttcagctacggtgccccattgaaagagcgcgttgatgcgatgtttcatgttgtatatggggtttactattattggttgtgtaaaagtagacaaccacgtacgcggaggatacctcactgagtgttgaattgatttctgtaagccactgtaggatacagtatctgcattgcagttgcaattgcagctgcagtatcggggtattatctcattcatcatcattcatgcgcccggatcgcctggagtggagggccggtcctctctccatctattagtccctgggttttacggaaaccgtcctccatgtccttgttcagatccatctgcttcgtcaggtttgacctctagtcctgctcgaataaaagcggcatgcagaatccgccaatgggcctcctggttgaattcgcgtaggctctccagagtgttacgctgcacctctgcccgtagatcgatctggttcgacaccaacaaccccttctcaaggtcgatgcgagcgttcagaatgccaccttgaatgaggccgattagttcttggacaaacggcgacgaaatatccgtcggacgcgcttcgccgccaacgaccgtaggggcaaagatcttcgccatggaatcgagtgtgacacgactaaaaggaatcatgtactgctcgatggatttggtgcgaatgcgtttgtacaattgagggatgtgacgctgaaggtgaatgtcgagtaagtagtcagggcgataagcttcgagaatgtcaaggcattggcggaacttgaagttgcagaagaaaacgatggcgcggcggatatgaggctcgagctcgaggaaggtgcggaaagtctggttgtcaagcacatttttctgcagatcgtcgcggttcatagaggcgagagcacatagaccaccgtagacggcgacatcgttgggggtgatgacttcattgtaggtgtcgcccaggtccggcgggatggacaggaaagagtttgctgcatcgaggtacaaggtttggtgcatctgtgacagagcagaggcggctgtgattttcgaaatgtttttggctgcgtcatctggctttgactgagagttgcgtagccggtgcacatttgactgtacagacatccagtcaccgcgttcagtagcgacgtttaccatcttgaagagcatagaagtaatgtggttcggagtagtgcagtagtctctcatgcgagagtaagctttggaggcagcagctagatcaccagtcttgtaatgatggttgcccaaatcctcatggcccatctgtagaggtaagtgtcacgcatcttccaaggatatttgtcattacttacccggatgctctctttaatcaaattatttttgtatccccgtagctcatgttccagacgctcagtctgagtctgtacgtatcgattggtttcctggacccaggcggcgtcaagagaagcatcagggtcgctcggagctacctccgccagtgcgcggaccgccttctcatatctcgaaacgtctttgttgattttagcttcgtcgatggcacccttgagggcgtcgatcgagagcaatggggagcaaatgccgatgaggtaaagacggtcatagcgggtacgccctggtcgtgcattagaatcagaagtcgtttagagacaaaagtgtcactcaccagcgtagtttgcaatgtaagtatcaaggtcgaatttcgggggctctagcaaatcaagtaagtgtgtgttcccggcgtagcaacatcatcgcgcggagatagccccgcgtggggttaacataccttctaccttcactagtgcctttggtcggggtacagtgatagtcgtagcctccagagctgtggcatccatatctgcccgagacggaccagatgcgtctggaagcgtggtgtccatctttgccgagctgtttagacgatgcgttgcggggagaggtgacactggcaaatcgaagaaatggagcttgattagcaagctagggtttcagtggaataagatagcgaccaatttgaacgctaagaacaatatgctgttaagggaagtgaatgagaggtgggtgacagccagtcggtcgatcatctgtgatgggtgattgattgtctggcaaaacccgaccgcctacaacaccgccatacagaagggccgtgaagatgtacatcaatacggagtagagatagggcaaaaaagaaactgtcattctctcagagtatcctatattttggcctgatatatcttcttatatgacccaaatagagctaaaaggccaaaagacaagctagaaagctagaatgtcactcaaatcgtaacaatggggtagcttggttgcagcgatacgcgaccggaagactctgttgatcaccacgaagcatataatggaaatgctgaacactgaagactatatattaatccccgggcttatatgaagacgtctgaggcactagaaatcctcgaaagccgtagagtggagctgcactatgaacctcggaacgtgagtaatcacgaaattaaacatcaagtaacctatcggctatataaaagcggctcgggaccccaatatcttgattataatccttcttgccgacagcataaacagatatataatcgacaaagctcggcattcagtaatcacaaacaaagtatataacaagcctaatccaagacgtcaatcgaccccgactcaacttctagcaacagaacgaaactcctaaagcctcaaaatgtccaaaacacagcaagtcaccctgataataggagcatcacgcgggatcgggcgccaaattgccatcgacctagcaaagaacggctacgccggtacagccacatgcaatcccacatagaccatcgagactaaccccaaaccccagtaatgctatccgcaaaaacaacatcggacgcatcgacagtgactccgttcccaccagacccgaactcatcgcagtctaccatcaacacagtagagcgcgagattcacgaagcgggcggacacgcggcaacagtcgccgttgacgtgcgtgacgccgcacagatccagcatgctgtcgacgagacggtgcgcgtctttgggaagctcgatgtgctcgtgtacaactccggcgcgatctggtggtcttctgtggaaaagacgcctctgaagcgatttaagcttatgcagcaggtcaaccccgagggactgtatgcgactgttcaagctgctttgcctttctttgagaaggggggctggaaagggcgcattattgttgtatcgccgcctatttactcgaggttctttagggggaagactgcttatgcgatgggtgagttacccttgatatgcggggtaagggatccacatagagtgtgtgctgatgatgtgttgtatgtaggcaaagtcgcaatgagtgtcttggtcaaaggactggccatggactttgtacgccaaggccgaaatgaaatggcggtgacgagtatctggcctgcatcggtatgtgtcttggtcttgattccatccggacgtggagtgcatgaggggattgctgactgcatcattacttcctagtcgattgaatcagcagctacagagtataataagggatccgacacatcctacaagaaggatttgagaaaaccggtatgtccatttcgatactgtctactcttcctggtcaattcaatactgacacgatgcaatagacgatattctcagatgctgttctggctatgcttcgtgccccacatcaaatagtgaatgggctcctggatacagatgaggactttctcagggagaaatgcggagtctctgacttttccaaatactctgtaatcccaggatcgacgccacggcggatcatgccggccaagttcccagtcttggaggttgcagagcaagacgatgaagggcaacgaatggatagcacgaagttacgggccaagatataggtttgtggaggggtgaattgaacctctcattcagactagacgtgcatttgatacagtatctgaaaactggagatgtaaataacccatgtatacattaatagggttaaataatattatatcgcaagatacataccaatgtaggaaatgttaaaacagggtgtaatgagcgaacggccagcaatagagtactccataaacccagacaagaaagaaaagaaaaaagaaacagacgcccattgctaatgcagccagaaaatgcaagcccagaaagaaacaaaagactagccaatatcatggaagcctcgagcacgaataacggaaactccagggttcaatgcccttggcgagccaatcagacatagacccttgactctacaagagaacagcaaagccagcaacaaacccaccaaccagaacacaaagcccatagacatggctgatatcaacagagaccatgcgcggagcagcgccagtagcgctggtatctccatcgccattgaccagggtattgacaggggtctcggacgcagtagcagtagcagtgttggcggtagtagtagtagtagtcacattgatacgcttgggattctgggctccacaagggttatctactctgcagttattctggcaagtggtgttaccgtcgcagttgagaacgcattggctgttggtttccgtgcagatgtagtaggggattgtcagggaatattcagtggcgttagggctgacgccgttgctgcatgtgcagtcgtaggctagtgtttcctgatgattggagttagttgggacttttctttccgttaagatgcttgctaagcgaagggcttacggcggagcagttatttgttgttggtgaacccgaggctcctcgtagttgtagacagaggaggggacatgtggatgtctgggagttacaccaggcctctaagggaagggagacgtgttagtatgatgttcatatgtatagtggagagaatatatgatatcaacttacgtcttgtagcaagggtaaccgatgtcgggtcaaattggctgttgaccagagtgacagccgaagcgaggatgaacaggctcttgggcagcatggtgtcggttgagcttgagaactgaggagatcagaaattggcagcaggcagctacttgatgctcgtgttagactttttttcttcaagaatgccagtgatagtctgacacatgccctagagccgaaatagagccggcgatagctatctcgggcagatggaatgaagggggaaaggtgtaatgggtctaggaaatgtcatggaacctacagtatgaatttcttgaatctttcaagaacaagctgagaatgaggaggatgaagatgttgatgatctaaagccaatagcaagaggctgctccttgaagttgtaaagatttaggggtgcaagtagctcaaggaggaaaaaaaagtagccagcaagggaggagtggggaggtcataaatgaaaagagcaatcacaggactataacagcctatgtatagaattgtgctagctggtctgcatggtggcatgcactagtgcactctcgcggttctacggcatcgaatggtaattttttccttttttttttcagcaagcccaagatatttcctgtcaagtgagttcagtagtagacccgttgcttcggaagtgaggtgtggatttggacgaagggtccgctataggggtttacccttgcgatgtgtcgatccggggatatctccatgaagctcgggtagagacgtttgtccaggccgggtgggagctcactgtgtgtcacatctgtcatcctgtcgatagtctccactaaaaacacatcattgtaggttctcaaagataggaaagtgacatgtctcagttggagttgagaaactggaaagattagaggacgccgatcaagaaacgcttaccgcattgggattggcgtggtttgtggcttgaagtagtcggatgagattgtgaaagtgtcaagttgaagtcgaaaggcaggcaagtttgaaattgttgtcatatatgagattgatcttagagaaatacaatcaaaactgtcaattatcaacgtcatcaaagggaattgggtacaaagcatgaacatatccatatctgcccagccttagctaatccacccgaaccagcccccgtgaccgccaatgtctcaaatcgactccaattgaatttcgttatcgacacactcaacactctcactctctcgccaccatcgacggttccaaggttagtttgtctcacctctgatcgcttgtgccaccccgagtctggcccatccctgcatcaactccaatgtctaaaatagcccgattcataccaccttatacttgccaccccgcatgatggggggaagaccgccggtccatccccgaaccgagccacatgcacccaaacgcatcgaacctacccaacggcattgaacctcaacactcaacagaaaagctaacgaataccctcctaccgaacaggccaatacctacatattccttacagcatctaatggatggagccagcacccgaggaggccaatccggcatctaagccgccctccccacacccagacatccagcccgaccccgcactccgacctgagaccgagaccgataccgataatgccaatgatgatcctacaaaaaccgacagccacgatgatcaatcccagagctccccatcctccacctcccgccccctctccgccgtagtgcccccctactggcgccgacacgagcgcgatgcctcacacgtctcgcaggcgtcgctgcgtggcgctaccatcacattagaagaccatactaccgacccgaactcggagacgagtcgggggctctgggcgagtagcgttactattgacgatcatgttgtggtgcgcggtatgactggggtggggtcgtatgttgtgtggaattgtacaattcagacacttgatgtgagtttgggatcagataagggaacgtgattggcatggctttctaatcggttgtttctgtatagggtggtccaattgttgtccggatgaggtgtgttacttctccgtcccggtttgaaaggatgttcagctgacacttgggctctatagatactccgagttcgatgacctgcgccagcggctggtggcttctttcccgcatgcgaggagtgcattgcctgcattgccgccgaagagcattatctgtacgtcccttgctcctcttaagattgccattcaatcagctaataacccttatcataaagtcaaattccgaccctcatttctggaatcaagacgcgtgggcttggagtatttcctcaagtcagtatctcatcctatccacatgattcattgtgtagacctatttctcacaccgttccagctgcgtccttttaaacccagagttctcgggctcccctatcgtcaaagacttcctcttcggtcgtatatgttaataatcatctcgtcttcactgggtggtgctggataggttatatggctgggcgtttaggaattgcattttgcattttgcattgtacatctctatatttcgggctgatactaggaacctaagcccacaatactggatatgcgactgttacctttgcttacagaagggaacaacttacataaccatggcaaatactagatcagacgaagcggtctaatacatagaaagtagaaagggccatagaaatcgacaaggatttttcaagagaaccgaacaatgccgccgctaaggtacaaagatcccagcaagaaccctaggcgcaagcaattggaatagaacgccttgagtatgatgtagtgcccagcatcgctgaaatagcaacaaagaaaagaaagatatttaacgcacacagggcgaatagaatagaagaacctcctcctcaaaagtcttgcctttatgggcatgttgagcagaatcatccttcttaccatcacccttcaacttgtgactcgccacaaaagcctcgacatccgcccggaaaatcttgcgcacacttatattagccatatggatcatggcgagcccgtggcggggaccgggtacgccgcgtgggaaagcaatataaagatccgagtcctgggtcgggtccgggcggaatttgtcatggtatgcctttttgccgctgatgggcagacggtggaacgcatgatcgtacaagccgcgtgtgatcttcttacaggcccacggcatgcccccgatatcctcggcggtgagtgtttggagcggttcgacgccgagaccgaggtatgagatgccggcgcgtcggaggagcgccattgacatgatgagaagaaggtcgctgattccattcacgcttcctggggctgcgatgcacggatcgacatggtagccgcccgaggcgagccgtcgaagagcggcgaaaccattgattgttccgtctggggtgcgggtgtagaggaatgtcatcagggcgggaacagcaaaggggtcgtatacggttatgaaggcttgcgggatagcagatgcattgcgctcggcgcgccaggtgtcgtatatggtgattaggttgttttgtagttcctggtttatgccgtgcacggcgggggcgtacacgcctatggtgatgccgcctttgtttttgtttgtgagctgacgactcttggtcaagatgcgtttcccgctcttctcgagaatcacttcgtttgtctgggggttgagtacgcgctctgtggcgaagtggatggttgtccagccgtttggtttggcgtgatctttgagaaaggactcgctaacgcccatgaatgctatgctcaagtgatgtcgccgtctataggctgcgaattcggacaagacctctggtatttcgtctttgttgcataaaggatctccgccgatgattgccaccccgttctggaccttaaatgacaatgctgctgtccttgttttgttcacgaagaatcggtagctgtggtcgaggattcccatgtgtgccactctgccatgtattgcagctatttgttggatcgccgttgttgttttgaagtcgtcgagtgtgaaaacggtatcttgatctcggcattgcgctttcgcatgaaaggaatcagtatcgactttggttggttctgggcgagtagctgggatgcgttcattactatccacactcgtcgccggggtggaatcggatgtcgtatggcaacttgccgaactgcaagaggaagagaccgcgggacttgcgacgatattcttgcgcaagtgatccataagggaaattgacgaggtaccactgtcatcactgctgggtttggatgtctcaaagagctggtcaattaaggagtctcccatctcatccacgaacaaggtcttcggttttcctgcgacggggttcggagtgtttccctttcgtgcgcggcgtgatcgcatcttcttggttgtgggtacctcatgcgatgccgcagcttccgacatggtgagtgggacgcggaggcgctcggagggaataaaagagcaaaatatatgagaagtcagaaaagaaaacagcaagaaaaaatcaacatgaagtcggagaattgtcgggaaggcaaaaatggcgagtatgaaagtgctcttgcccgaagctacgtcggtatattaggcagaggcattttcataggcagttcccttcgtgcccatccagtgttaccgcactgcgtacccaggggtatagatcggtctcaccaatcagtagacggcaacggggctagatcgaccgctaccagccttatgagctcttggctcgtcctatgacgttgggaacagcagaataaagtgtgaagcgaactatatatagtctgggttctacagatctcttggctattacaacatgaccatgacgaaccttggaatagaggtacttatctctcacctctcatatacctttgtctaatttgtgttggagttcaattgtgccatgagaaccagccatctgtcagtatcagcatctaacctaagtatggttagcgatcaaatatacaaactggaagctagctaggtgtgcttaggttccaaagctgaattatggagaatatgcaatgaaaaaccacatgaacaaacgcaaaagactggatatcgtcaagttcaaatgggggtacatgaaggcgcaatgcaacgcaacgcaacgtatgtcttgatcgaaaggaaacaagcattcaatgtccaagcagaaaagatcatctcagcatgacaaaactggccagcgaaagactgaagggggaaaagagacgactactcatccgcagtaccgtgtccattcatgtgtccgttcactgcactgcatccattggcaatgtcatcaccatcactctcttgttcaatactggaatcactgaattcaaaaagcccactgatttcagtggaagaatcatcactgtcacactccctagccatccgtctcagacacgccaaaagttccttctgctgcttcaagatgttatcggccaaacggacgatcctgtcagtctgctcaatgcaataccgcatttcttcggtctgacgctcggtgcgaacacctagcatcgaatcctaaatctctttattaggataacagtatccagaggaccagttcggtacgttcggtactgacaatgtggtcgatccagacttgccctaggatggggtctggagtctccggcaggtaaggcgagtggagattcacagtacgggacacaatgcagtcgcgatggtggtaggcagaggagctgcttccttgtccattgcctgatgcggaggcagaggcatggggacgggccggttggatgatctcacgggtgggtctgccagactccatagtagggctgttaaattgaatttcaaaatcttgaattgaaattatatttttaattttcatgaaatttaaaatataatttcaattgtttcacgctaaggcgctagtaatatattggtaatgttttgtaatataagcagaaaaaaaaggcagaaaaactagcagtaaatttttagttactagtaaattggatgcacaaatttaaggtccctactataagtactcaaaatttcaaagggttaaaatacagttaagaggtagttatggtgcgtacaaaatatggccgaattaggttagtgtcattcttcccgtagccctaaacctcaaagatataccttaactttaaccacgaatttcagacgctacactagctggatacgaaagataagatatggtctagaatgcttaagaaaagggctttctagtgatactaaaataataataaataatcattattttatatgtacttaggctctatgatttcctatatagaatataatttcaattgtttcacgccaaggcgctagtaatatattggtaatgttttgtaatataagcagaaaaaaaaggtagaaaaactagtagtaaatttttagttacacaagtcataaggacgctttacacttattataatacacctacccctatcagtagactcagagtcagaaagctcatttcctagactaaggctttcagtctaaggcttaagagaagtcatatcctagaagaagcgatttctgataatctgctccttatcaaaccggtctatctaatcctacgccttttctaggtcaggctattggataggccctttacttataagtcgatagtttatctagagatagattagcttattaaccttcttaggtaaaagagaatgcgattatatacctagtgatttcgaggcaatagcgtcgactgcgtttcgcgcttaagcctggctgtagaggtgaccataccttagtaggctggttctataactgacttaaaggtattgctagctgtaatacccgctttaggtaacgatagggaaggaaattctaccgcgtatactaccctatagattattcagaggctggtccttacgcgtagtaatacagtccctttataaacccgccaaactattaagatagtaagagtaacgaccagagtaataataataataatagtccctatagtcctaccggtagtaccgatggtagtaagggaagtggtactggcggtagtagggctggcgatagtggtattggcgatggtggtactagcgatagtggtactggcgatagtggtacttagagcgactctttgactgtaagtcttctatagatatagggtaggataattagatgtcgtcggtatatagttcggccttgtataagagtgcctgaagtaggacggggtggccggatataggggctacagggagcattttcttacctagattaccagagatatatttttgacctatacattgcactctacgtggtctagcggactagcgctacataagcgtaggcggtctaagaagaatactaggcggtgtaggtaagagcctgtattcggagtgcctgaagcaggacggggtggccggatataggggctatagggagcattttcttacctagattaccagagatatatttttgacctatacattgcactctacgtggtctagcggactagcgctatataagcgtaggcggtctaagaagaatactaggcggtgtaggtaagagcctgtattcggcctaattaggcttagagtaagctatgataatcttattggctctctgaaaaattaaggtatctaattggtggactactaagagtgggtccatgcctgaggcatagaccgattttgaaatgaaataatattttagcgttgaaattgaaattgaaatgatatttttaaatttcaagtgattttaacagccctactccatagtgggccgctcggtggaggcggtaacgggatcggcggcagccgcggcggcagcgagggtctccagagcagtgaagcgagagcgtctaggctcaattcctttgtagctcttccgactactgccgtcaggcccaacagtagcaagcttaacagtcataatatgaacggctgaagcaaatcacgggttgaaaaatgagcgatgaataagaatgggcaaaagagcgaaacccagtgaccggatcagatgagacaagcgttgtgggatgaggaagactgaagggacatgtttcgatggcactaccctttccccggtgttgacaagagtaaatgagtccccatcgctgtcgcaagacaatgttctccctctttcattttctatactcctgattggtgggtcaccatgtgcactagtccaagaacagctagcgcatatatccacacgctactcccatttaggaaattgacatcccgcgatctcgacaacatgtctgaccactcacgcttgtccagtcccttctgtcgaacattcccccctgactgtctatatctctgtacttctacaataaaacacaatgatcacaaatcgcccggctaccccagctgatatcccccaagtgcgggatatcaatcactggtacatcgttaacagctgttccacttttgcaactaccccaccgccgatatcccattatgaggacatccttcgggacctgtccagaagaaacctccccttttatgtcgtcgtgtctgacacgcggaagggaccagacggcgcagatttagtccttggctacgcttacttgtctccattccgtggccatttgctgtcctatgcaccgaccgtggagctgtcgatcttcatgcgctatgaccagcggcaatttggctatgggactattattcttagaaagcttctgcgcttagtgcagcagggggaaattgagcaccgctgcgaggagagagtgggcgatctgccgcggattgggtttggtacctccatggctgtcatgaagacttcccttgtgcagaatatcattgcaatcatagcttatgacacggaggctccgtttgacggggagttattgcggagatggtacatgaaatgggggtttgtcgagagggggcaattggagaacgttggacgaaagatgggtcattggtgagttgcttttatctgcttggactgatggattttccagctgatgactttgactaggattgatactctctatcttcaatggtcaatgccagaaacagatagttattgatttggaatcagcgaagtatccgagtcaatggataagcaaaacaggttggacagagatgggagtgtatattcatagtcaaggcctagatagtcaatctgctcagatattataattagatggtctatgattggcgtagtttctccatatcaccgcaaggcaaatataaagatagggactacgaccgattctctactcgatgatggctcagcatgcaaagcttggggaagatagatgtgatgtatttctagctagcttggagccaccttgtagacagtgatatcaatgggatctgacttcggccaaagacaggaagccactcgcatacccactcttctccaggcaacaggctggtacctactgacaccccgagagcaactgtcgagataattattgaggtatctggcatggtgaaaaaaagaattcgaactcgatcacccactctggatgcccgaatatcttatccagcgttgccatattctgagccagatttggagcatccgcttgaacctgctagttggtgactctttgacttcgggacgtcgtaaccttcatccgtgtccgacctcctttcgaattctctatccaactccaggatttcatatggcttgtaccgggaagatgtaggtattcttgttgtataatgggaaggaacgtgtaggtgtaggttccccggcgcgcgcggcagcgtgagcgttgtccgcatccgcttccctgtgccggctacatcaaaaaagcaaaggtcagcatgttgttcctgatattctacacaacgatcaagtgacatacctctcggtgcagcttacagtggtcagccttctgcaagctggagctaatctgcaagttaaagtaagaagtcaataaaagcaaagtgagaagagagtgaatgcaaggtgataggacagtaaatactcaaagattgaagaggaaagaatgaaccctctgcaaggaggattggttgtccctgttcaaagtatgcaggatacctccaaggattctgtcaaactggcggtacatcatacgttcaggttcatcaggagattcaccaatctggaagttgatgtaatgggccaagtctggcatctcgcccttgagctcgtgaagtatcaacagggtaggaagccaacagtagctgacttccttgcagatactagcctgagcgcggcaagtggaaacaaaggcatggaacgaacgaaactggtaccatcgcatcgtccacagcttcatgaatgccctagactcggtgtcctctgcatcgggcaacaagttgatgatcgcaaggtaggcctcgtcagctagtcaaaggtggttattgctagattttatgagggcgacgaactcctcttccagactaagtatcagccatttgctcaaattctgcgaccatttcagccagttttcatatttgatgtggtcgagggtgggtcgtggaatatgctgatgtttgctgatgatatcaatgaggttgaggtctaaggacgagctggatactggttttccaggatttgagatccgatatctcggacaatttcttgacatttgtgttagtaatttcgtcaaatggtggcaggtcatcgattcctgggctcggattgagccaagatattccatggcgttggtaaccggagttgaagacataatagagagatatcataggacctgaaatgatggttgatacgggtgaaataaaatatacgcataataaaaagattgtttgagtgggaaattctgttgtgagaaacgtgaacgtgatgctttaaatcccacctcaggacgcactcgattactacatccaaacttcattattcatatttgccatcagcaatcactactgtctcgctggttccttcttccctggcccgttgtacagtcgcagaatacctctttccagcaatgagccaccaagcaagctcaatactcaagaatccgccgacaacaacacaggtatagttcatgtttgatactgcgtggctgttagcacatagcttgggcaggatacaaaggaatcatagaaaaccacagcacataccagttacaggcatctgatacggaaacgagaaaaagacaatggcaaacaccagccacgccaaagagacgatgttcacggtcattcctagtgtctggcccatggagaatgggccacggcgcatggttcggcggaataagagaacattcgtcagaatgggtacaaggtaggcaaagttgttgatcgtcctgtatccatgtcagtgtcaagtcgttgctaactgctttgtagtatgaaaaacctacaccgcagagctcatcattgcattgaatgccgtgctcgaccccaagtatatacagccgaggagggcgataatcacggtaacacagagctgcgcattgaacggcgaacccagcttgggatttacacgggcccataccttcgacaaaggcaggccttcgtcacgggcaaaggcccagaagactcgtccggtacctatagaagtcagagggttgatcttcgatagcgaaagtactacttactcaattgtgaaccgatcacgcagggcccaagagcaatccataccatgaacaccagcccgaatgctccacctcttgtagaggttgcctgccagaagagctcggcaagaggaagtccagtatgtgtgttagccaagctgccataatcttgaactgagaacattagactgagcagatatgatagtccggtcacgaatgcgattgatagcgtgatagctgttgatgcatacagttagccaaattatcgaagaaagcaacacgaccactactaacctagacccaaaggggcattctttccgggctataaatgctggttagtacaatacatcagatttgtatctccgagccatctcaacttacattgggcatttcttctgtgatgtgctgtggtatggtcagctgcattcaaccgggcaccttaacaatgtgtacaactcaccgaaatgccatctagtcctccaagtgagtacattggattgaccaatccggtgataaaacagataacattgttgtcccagccggtgttgttgatccaggtgcgaaacacgaacttgctgtcattatgaactggggctttggcggccacgacaaccatggtaataaaccaggctaattgcaggtagaccactgaaactcattaattggtgaaccacacaggaaaagaacccacatacatgaaaatttgttgattgccggaataaatcgattcccaaacatcaccacacccgaagtcacgatattgaggatctgataagcgacaaaggtcatccacggttggaccaccaggtcatcatggtaaagagcaatcagcgccatggcggttgtggcataaatcaaattggttgatgcagacgtaaagatccctaggcttcatcagctcatgctaagacttttaatgctgggccacccacatccaaatacagtgcaccagccggtggcaaagctgagcaagctgttatatcgcttgggagcaatggcggcaatccaatgatacatccctccttcggtagggtatgctgatacaaattccgccagtgaagcaccgacaaaagattgaaggatgaaaacaaggatgaagccgtatatcactgcgcttggtcatttattgacttccatgcgatcggtacggaatgaaaactcacgggcgccaggaccacctgcgtcaatagcagtcatcaaacccaagccaaggcctattaccatgtgagtcggatgctgagcgattgcatgaaccaactaacctgtccatgaaatagtacaattcgccgcgagtccaatcaaactccaaagcgagaaatgtcgctccaactcctgcttatgccctgttcgccgtcaataccatatctcccaagcgccggattcgacacatacccatctgggccaaccgcagctcatcctcattctgcaccttgataaactcggtctctttcccatctccaatagacccgaccggcggagaggtagatataatttcagggccgctcataatggacataaaatcgaatatcgcccacggtaggaggtgagtatcacgaacagaaaaagagggggtacacatgaataataaataaaccctgcgcaacgactgacctaagtaccatcatgctactccgcgcgatgatctttagctcttatcacaacccggcaaacctgcagaaatcaccgggttcgccgacaagatagccggtcggcggcgacgtatcagcaggcgggattccgccaagccacatgcgtcccggcgatcgcggagcttcgccggtgcagaacgtggggaggactggaacccggaacccgctcgcgtgtctgcttcatgcacaggccgttgtaaccccatttgtgcttggcggagtataagcttgcgtcaaacttggtgtgctgtgcttatctcaatggaataattcggagaagattgcagtggatgtggaaggttgcgacggcgtaatcgacgatgagtcgtgtagcttacgagtgataacacacgatgaacgactgtaagttcatatggtcccacttggaggtcctgggtgatattgtattttgtatcaacggcattattcatcctgaccgacgacatccgaagatagtttcgcctactcatatgctattccgacaggtggaacttgatacctacgggtctaagtgcatatcgaggtagatatttgaatctacagcttctgttcgcacaagcagtaggtccttgacaattttcatatttaaattaacatcgctggtcaaattaccaggttttcacagtccgtccccttgtatacagtatcaagtatgtattttcattcgaaactcccaagttctcccgagaaaagttgcttcctaggaaacgatttggtttgccgaagttggacaagtctggcatctcttcctcgtgctcgtgaagcggccctctgaagaaacatggtcttgaagtcttccggagctcctgccggacggctggtttatcccaggctctttcttggtgagaaactggatatgcggaagatttccgatattaatgagatgacatgtttcatctagcagctccacaaattcttagttggattcttcgagtacttttgtaaatactcaagctttcgaagtatttcgtactggtcgatcaacagaacaccattctgaagaggggatgatgaatatgacggagtactctgtttgtttcgttaataggatccaggacagccgcatagaacgagatgtttggtcgtccgttggatgctgagtgtagttggtctggtccagtgcgaaccagtatagcctgccaaccagagagatactctgcgctgtctttatcatggcaggaaatctctgagtcctcgctctcatcattccatttccacgatcggatcggcttatgttgaagaaggaattagcgctccatattttgaagtacaaatcacacagcacatacatacatacaggatctgctgcgatatttcttgacctccacaaccaacagagaccatcaaagtggaagtgggaatcgcgctctcaatcctagcacttctcggaggatattgggatcacgtcacaggtctgccatatcttcctctctctcattctttttccctgtacacccagttagcatacagtccattatactgctcgttcttcttgtggtctcacatcgtatattgagagtatattgagatcaagattgtgataaatataatgaaacggaagtaagacacatctctaccatgatttgttaagtctccggatctctatcttccagcgctctgtgtcttttgagatatatattatatgacagattatttacagaagaagaaagtagccgacgaattttgtccatgacctggttaaatatagcaaacagcaaacagcaaacagcaatgggataatgtgtgacggattcagaacacaatggcatccccttagcatctttctcctgtcgcagtggatatcaccggagactgtcctattggcttaggagattatatttccccgtgggcatctcctaatttctcggagataaaaatccattcgcatgtactgattggcgacttctgcgacagacacaaaaatgaataatccttccaagcacgacaagaatagccaaaggataaactattgtgtgaaaattgaagctaactctccaactcaggggctattacatcattgagctctttagctttacgatcttgcgcacgaactcatcccgggagacctcaggatcgaccgatcgatccgatcgagcttgaaaattgattgtaaggttgtcgatcatttcccaactgctgggacattctggcactttgccctcatactattgggatctattcgctctcgtttcaccagaaccatggactgctggttcaaaagactgccgatcaccctcgtgggcgatcatggacgatatagtcataatcctacagatttttctttaaaagacctggaaggcctaagcacagatccgatctcgatttcgatcccttgaaatagtacagcatggaaccgccgtccatcccagataatcgtcctatcaagagacactccgacatgtcttctacgcctactattgttgagccggatagctttggcgcacatttcaaacccatgagctataattccccacgttcaggttctcggggacaaggttacgaaccgccagtgtttggccagccggctattggaagaccatctgttggaccgcaagagcgatcaactcctaacctcaatgccaatggtatctcgaatggcatctataatggcgaccagtttggtcgcaagctctccatcgatcaacaatcagtcgcagattcagtcaacacactagatttgggctaccataacatcggccagcaaccacgaccacagcacgagatcccaggccaccaaccctttgaccagagatccctcagcacactctctctagaccaacagtctgtcggaacccaatcgctaggccaccattctataggacggccaccaggcggctatgctccgtaaggccgaacagtcccaattgccagaattccgctaattacgcagatcatctacttcgcccgcccgcctccactcgtctgcctccaacaggtcgctacaacccaacttgccgaccaacgaactcccagttcttcagcaaataaatccaaacgagggctctgaggaattcgaccctatcgctgaagaaaatgaggaaacatcttttgatctggtcgccccatacgagggcgatgcggcccccatgcatactctagaacgacaagcggacctcatgttttgctcggaccatatgctagcgattctaagcactccgcgctacctcgcacgcttccgcgagttccttgcccaggagcgtccagggtcattttcaactctgaattactacctaaatgcttccaaggctctcaaagcaatcgagtatgctaattcgctcgtacgttcggttgttgatgtgcctacatccggtattaaaactgcagagcacctcgttggctcgactgtaaatgtggcgcttgaaaggcgcgtgcaggcagcgctggatgccttgactgccgaggaattacctgctttcattacctctacatgtatcaacattaccggcaaggtagttgaggagcatgtgcgcggaaccttgcctgagaaattccggggaacggcagatgcgctgggtgaggtattctgtctgaccgatccatcgcggccagataaccctattatctttgcttctgagggtatgtcggattactttacattgtctacacagaatagctaacgcactatgcagaattccaccgcactacacaatacggcatggactacgtcctaggaaggaactgtcgattcttgcaaggaccgaaaacgaatcccaacagtgttcggcgaattggagaagcgctcagggctgggcgacaccactctgagcttttcctgaattagtatgtgccccaacacatcctaccctgcaaaactaattcgaaaacagccgtcgcgatggctcaccattcatgaacctcctccaaatggctccgctatgtgacagccgcggtaaaatccgctacttcatcggcgcacaggtcgacgtctccggactcgccatggaaggagcccaaatggaatccctccaaaacatgcgagcgcaaaaagaaacccccgggacagatggccaaataaccaaagaatcaaatagccagttccaagaactcggcgaactcttcagtccgcgcgagctgcggaacgtgcgcgagcatggcggaaccctcttccaaccggtcgtcaacgaagatcccaaccaccgtctattcctccaagactccgacaccgagaacgaggtcgaaacccaatcccaaggtccaccgagacccacatccgggccgacgcctagccggtccttggccggtgtctacaaaaacgtatgtcatccatccctccatactcggatatggtatcgaggactaacagaagtaaaccagtacctcctcgtccgcccatacccatccctccatatcctcttcacctccccctctcttcaaatcccaggcatgctccaatcctcattcctaaatcgcatcggcgagacaggcgcgaaacgcgataatatcatcaacgctatgatggctgggcgaggcgtcacagcgcgtatcaagtgggtgaccaaattcaacaacgaccaggctcgtcatcgctggatccattgtactcctttgctggcgagtaacggccaggtcggtgtctggatggttatcgttattgatgaagaggaagaggcagtcagatggaagggtaattggccgactactaattaaatagtcttgctatgtatatgtaaattattgtgatcactaaactatctcgtgtgtgttgtaatacgttagacttcatgtgtaccggataatgcctggcgctcgagacttttcccctttcattttagtgctcacctcttgccgctttttgctctcagagtaaaattgagcataggctgagcgtaagtatgagctacatcaataagatgcagcacgctagtcacatcacgtgcggctattatctagctcaccctccatacattacgacagcatcctcagcgataatgctggtgttgggtcctaggatactcacgaaaagattacttcttatctgactggcgctattatgcgcaagttggacggtaatactcttgtttcgcttttcttcggtgatatggaagtgcgtttgttgccgcacctatgggaaagcaccagatacatcgatggagaaccccgatttttgcgtaaatactgagccccttagcacgcaaggcctccctcctctcctcgaatgacgaccgggtgactgattttattcaccagccatggtttctgaccagaagatagacgcagggttagctgtggggagtgagatcctgccaacaatcgttgaaagtaaagaaaacgcaatatccagtctaacatggaaagctcgcttttaggacaacatcatcacagtaagcttccagttatggactgatcttttccctactctttggctcctgaaatttatactgtacggaaaatctacgtcagccagcattattaaatacctacgaaggtcagcagtctttgctttatgacatattcccagtttttcttgcttcttctcgcagaaacctgccggaccttgtcaatctcgtaaatttatatacccgaatccacgtttcatagaatccatcgcacctgctgcggcgccaccgtgatttcacgagagcatggacgatttatttctagccaaacatcccagcgccaatcagattctagtccaaacagctacggggtctttttacgttcttagtgctcaaagcttactatcggagatgctaccgcgcgcatactacgtctacgatgcaaccacagaccacaaccgccactcaaaaacaaaaggagcacacatttacactaataaaaaccctttaggcagcctgccactgaccaaaagactgtcctctcagtttctttcagagaagggagaaccggaattatcttctcggtatcgtccgcgctaggatttggttttacgccctaggggtttcctgtggaacagggtggccctttcgaaattctctttgggcacgtcctgtacaactacctagctggcgagcgatagctttaatcgaggatctattactatacagaattgatggtacgcggattccttgagattaacgttcctttggctagctatgtttggtagtcctcatttcactaggtacatcaaagctgtctcttcataaattacaatatcagaatagtgcacttggaaaagtgcctccgtggctttcatgttcaaacctggaccatgtttgcatattcatattcaagtggcgcgtggttatttccaatttggttgttcagtttcccactcattaagcaatcgcgatacttccttcaacgagacaggtttcgtaagaaataggtccactcctgagtctagcgccttgatctccgcatgggagctactaaggccagtaaaagcaattatttttgcccgaacgcacccatcccgtgctttttccatcgtgcgaatgatgcgcgttgcttcatttccgtccatgatgggcatggaaatatccatgaaaatgaggtcataccccttcgacatcctctcgacgcactctactgcttctctgccgttttgtgctatctccaaaagcgggacctttcgtttgttcataaaagtcgtcatcaggcggagattgatatcgttatcatctaccagcaagacccgaggtccgctctggctctcatttggcgtaccagtaggatttaggctggaagaattcgatagagtagacgacgtggtacgaccggatatttctgtccctgaaagtagcacgggattatcacgcctgacggagccaacatgtgagtgtaggtttggtgtgaaatccaatgactcagcagctggtttctctggatgaccaagtgacgaatgtgtggaagtctcggccattggaggcgggcgtgcaagcttgagtcgttccggaaaggcagattctgatccggcagtaggtagatgcgatctaggagacgccggtgtcgaattaagacagcccaagatacctcttgcgagtctttgtggaccgcaaggtcgacgtagaacgctaaaagccccagcaaggtgtgaccactttttcctagggtcactggagttgtcccattcattgcaaaagacgagcaaatttggtgatccagtaagtgattgccgtaccttttcgtcggacaagtaggtctcgttaacaaatacaaaatcaatatattcattggcagaccaaggcacgaccttgatgccataccaatccatcaaatactgagcgatcgaagaccagaactgatttccgataagggaggagtccattccccaaaaggcagcacaactcttcgttaaccccatacaagaaagttgtgtggacgggataggcgactttcctgcgcaatccacatcaattgatgatgaatattcttcctcggttagacgctcaagaggaatcgagacttggaccacagtgccttcgcctactcggctttgaaagtcgatacttccgtcaagtatatccacaatgccgcgaacaattgacagaccaaggccggtacccactgacagcgtatcctcctgcgaaaatggagtatataaacgagtccgtaggtattcgctcgaaatgcctttccctgtgtcggatatagtcaaggttaccatatcctcgggattctgacgccgcgaacgacctttcggacactgagtggcctccacgcaaattgaaaccaggcccttctcggtatacttgagagcattaccgagaaggttcatgatgaggcgccgcagcgatcctggctgaactttatatacccagtcgttgttggtaatattaatgacaatctcgatatctggactggaggtgacttcctcgtcctctcttaccagttgggtaggcaaactccgtgaaataagtttggaatgattggctagcgatgcagactgtttcatatgggaatgtcccaagcacacactatcaacaacgtcctctgtcaatgtggcaatattagtcgccacgaattgatccatgcgcgctgggttttgctcggtaaactttagctttgagaaatcctttcggcgcctggaccttctcttccgcctttccaatgacatgattttgctaaagtctagcacttggttcatcgtatccaatagtgttcgcccacatgcattgatagtctcgataagagattcctggaaatcatccagctgagtgtctcccaggaattcggttgcagccaagacaccatgcagggggctgcgaagctcgtgtctaagaaacagagtcagtaccagctgcattttagagagcaaatgatgactcacgagatgctacttatgaagtcccccttctggcggtctgcgatgaccgattcaacacggctgtattcggtcattatggacgatgcgaagccaaatattgaggtcaaatcaacagcccgactgaaaactcttgtcggttgaggtgtccaacagaagcatccagcaaaccactcagaattggtggcatcccataagggaacaaacatgacttggcacgcatcaggaaaatacgaattgagtttaaaggtttctgaggccttgtgcttgatccgttgtttctgagttgcggtagtggaatgctcttcgtccgaggtggataaagacccatctctgtgaaatgaccagagtcttcccttgggatagcgacgagttaatcgatatagaaaatctttgtccatattggcagccgcgcatggcgacaaagagttatcctgagacgaaaatggatcaatcctggtggaaatggaaagaacagacgcagaagttttcggattgacagaagtagagtcaccgctagagaaacaatctggcgagacgtcgctgaccttgagaaagatcacgccgccagcaccgtgcaagtctagaccttgccttaaaagatttgcagctcgttgaaaaatccggtcattgctatccgaggatatcgatgaactgctgccgcctcgacgtgagcttctgaatgaagccgctgcgtttgcaaaaggctctacgtctgaattctcgttggaaactgcgcttgaagaccgagggtcaccaatttgagagtgcgcatcgctattttcagagctggcagatcggctcgtccgagagtgcgccgatccccgcgaggaagaactagagtttgagctctgggagcgagacatgtggtcattgtcggcgaaactggatttgccatcaacgaaagaacgcagactctgcgacagccgcgaggcgcggtgcccttcgacggcccgtcggctgacgtgtagatagtccatgaccatcgctgccactgttcctagtgcgtccttcccatcgtcagacaggccgtcacggggttgagtatccaacacaaacaagcatcctagattagtaccgctgtcggtgatcaagggtgttccagcatagaagcgagagtgtggctctcctttgacgaatggcaattgtctgaagcgctcctcctgtgtaagatcgttgacgaccagtacggggaaggttccatcatccgtttctgaggcaactgcgactgtttcctgttcagataaaagatcaaatccagaacaatgacgggtgcgtggcaaaatcacagattgattggccttacccaacatatgttccaagcgtttggcaaagtcgatgttccggcaaaaagcccatctccctccgccgtgtacaacttcgagtttccaatatttgtagtcttcgtagcttcggctatgatgaactgtgaatcgtgattcaatatacttgatggccaaaaatcagcccaaggtcaacgaaaatgtaggtagatccgtcttggagatttgaaagataatggaagaattacgtgataaaggcacgctgtgcgttgaggcgtatggctgcctgctgtgcgaacgaggtcaatgtcgtattcggactagacagggagctagattcggtttcaaattcggaggcagcagagcgaggaagccatgctgcgttaagcgcggcggggttggctggttggaaataccgatagacctcgcgagcttgacgatctgcttcgtgggcatggatagtctcttgtgttgggttttccatattgataataatgcgcagatttacaaaatttgtagaatatttctgggaagtcgggatctagtgatggtttcaaagatccaggcacatggccagagtcgtatgacgtagatgttcctgtatcacgccttggaagtggagaaggcaaaatttgttggtgacctatgacgtgcaagagagagaacatcagtcatcgagttcttgattcctgttcgaagattgaaaagggaagctctccaattgttggacctgagctctgactgcttgcagctctgtgtttaatgaggtattggcagcttccaggtcttcgttccttttctgttccgctgataacattgagttcaaccgggtactcatctttccattgtaatggaatttctccatttgagagatcgaattgtgctaaatcgtccacagtattgaccccaaagagagcactatgtgctaatgcgagggagagaagaaggtagcctgatgtaaattgcggtcggttgctatcccggatactaatcccgaatctagagtatcaattagtaaatgaaatgtcctaactagttagtatgcctaaaaaccatgctactaggctctttctacttatatagtatattagacatctattattcttaagctagacctgtttgacccgctatcctactgcctaaggggctttggttgaaggaaatagtactaagttaatatactgaaattgtaattagtagttaataatatcgctagagtaaagagattctactttatatcgaagacatcttttatatttatccttatgaggaggaatagaagatctaacgcttactctaataaagagatatagttaaagagtaaataagatgactattttaagtaacctagagataaacgtttaataatctatctactataaagacgatatcgttctttggaaattatatctcataaagtttagcttctctctcttttggttcactattataccttccgccgttagggtttttttaattcactatctccaaactagaatggctatcaggattagtcttagagggaggtaacgatagactcacccattttatttcttttcgatcatctaggatgattttagtctttataaattcttcaaatccaccaaagaaccgctcggcatacgcctatacagttcttaccgttggtcgtccgttctcgtttagtcggcctttagtagaaccaatgtaccagcggataaactccttaatcatctcgtgacttagggctggacagccaaacgaggtcttatagtatttaaatctattttctggcccaaagatcaacattttatcgatataagttattggtctcggtaagccttttgtctttctccctaattaaatcctcctatctgcgggctctagggtcataaccgtttctttcccgttaaagacgacgtctctcttttgcaatcttattatacttagcaaaacactattttctacccatgaataattgcgataccataagggggaagggtatttcgggtaaatgagaccggtattgatttagagtactgagaaaaaggcgccgagagcgtaggcgtatgaataatcaacatactaggctaggatatagtttgcttttatatttgagattcgaggtcaagccataatgagaactcagaaagaacccttgaccgcagcattatgaaatagaggcagccctccacttcctcctacgcataaaaataacgtatctccttgataagatgggtagggttcagaaaataagggctatctactaactaaacatcgcagtataaccgaccctatgggcctggtccattaaaggtatagtctgtggtggtctgggtgatcagagttgctcactgattggacacagagtgtcacagagtagtcagtgaggatccaatagttaagcatttacacagtatcagtcatcatgcacgtgactgctttgagctgatcactgactgagcttgtgctgatttgatgcttttaagttgtatccagctcctctaggaagtttaggagatgataattgcgagatcaagaataaaacttctactaaatagcttgcaagatgctacttgtcctaaatcttacaacctagtctgtatcttacatatcctggcactcgagacctttccctttcggcttcagtgctcaccaagtgctcaccccttcatcccgacgtgatcacgggccattatataactaatcacctgatctgctcactaagcatcattatttgctcagtgtagggatggatgcgaaattcaatttgcccctagaataacatgttggactctgctttgtacattgaaaattcttccagtggatcagattgtgccctctgccagcaaatacccgccgtcgacggcaatagtttgaccattgaggtactgattcgagacagtaaacaacacagcagttgccatgtcttcatctttccctggccgtccggcagggattttgccttcgaacctctctttgggaattgtgctcttttgtttcgcgtcactgtcatcggtcgtcatttcggtcggaaagaccccgggcgcgatagtgtttacacgaagtttgattttcgaggaaacaatctcgtaggccaacatcttggtgagatgaattgcagccgccttactagcattgtatgcgaagtgacgctgggctgttttgaggagacctgaaatcgacgagatgttgacaactgtgctagaccatccatactcatcctctgatcccttgctcagcaagggtagaaaggcagtggtggtaaagaaaaggtgtgtgacattggtccgcatgacatcttcccactcctgaatcgtgctctggtttttgaacagctcttcctgcaatgctttggggttgtcctgatctgtgttcagatgtggagagctaataccggcggcgttgatcaaaatgtgcagtttcgactccttcgcggatatctcgtcgactagcttctgaatcgactctttggaggtaatatcggcagtgattgggacaatctggccaggaatatccttcgagtataaatctgcaacacggtccaacttttcctctgtgcgaccggtgatgtagactttagcaccattcacggcgagagcttgagtggccatcaagccgatgcctgaacctccacccgtgacaagtgcgactacccactgttagcgacgccagcgctacggcaagcccgtttctataatggtaactcacctctgtttttcagcccgaaaaggtgttcgagcttaaagccccggttactttcttgagctgacatggtgtttgttcaaaagttcaatggtatacataatgcttgtcatacatcgctcgttatatgttctccaacttgctagtcttacgtcatcctaatgtcaggctttacgatgatgggtacttgatgtaaaacagggaaaatgacggtttggggtaatttattcactaagaagtcattatgatgagacattgaaagaatcactccgtataatgatcagaaataggtacagtttcttgccaacattcacttaacctgtctaaacccgtctgtatcttgatgcttaaatcaagatctagaccttctaagatccatcgagcatcagcaggttttcatcggagtgtccttgtattggtcggatacatttactacgcggaaatgatatgtttgaactacttgatcttagtgcatgacatgtgccaagccgcacaactcgctgggttaaaaacaggcatcgaagctttttttattgcactgaacgagtataaattcatgtatgcttcgtgaaaaacagaaatatagcatataataaattggttgaaagtgaaataatggcaccccatgagcaaaacgagcagagactcataattacctcaaatcgccttccactttccgtcaaatccaaagacgacacttacgaggcgattccctccagcggggggttggtgaccgctctaaatggtttgagctttcatgcctatctgtggctaggctggcccggggtcgatatcaatgaacgggacagagaaagcgtcgacaaagccctggccaaagaaaatgcctctgcagtatacctagatgagagcctcgctcagagtcattacaatggattctctagtacgtggcctatattctcgggtatattactacctcgctgactaggcgtatttagacggtgttttatggcccacgttacattatcagtcggatgcgtccttcgataacgagtcatgggacgcgtaccagcgtgtaaatacgatattcgctgatcgaatcagtgaggaggcggcggatggtgacctaatatgggttcacgactatcacctactcctgctgccacgtctactgcgtgagcgcctccatgcgcaaaacaaaagatgcgctataggattttctttgcacacccctttcccagcaaatgatttttggagaggtcttcctgttcagaaagcgttgctcgatggtgtccttggtagcgacctcgtcggcttccatacggacgagtataagacgaacttcgctggcgcctgcagatctcacatgtaaggtccgggaaatagcattgaaataccaagtgactaaccaatttattagtggtgcagaaattgaaggcgacaatatctactacaacgaccgtactattagcattgataaatatgtcgttgggattgactgccagagatttgctgatgcactcgatgatcctgaggttcaggctgaaattcagcagattgaaacccaatataaggacaaaacgatcataatcggcgtggaccgcatggactacacgaaaggattgcccgaaaaattgcagggcttccgagtcttcctcgatcaataccccgaatggagtaaaaaggttgtgctaatacagatcgccattcccagtcgcgaagatgtcaagaaataccaggatttggagggggaagtgagcaaattggtgggccaaatcactgggcaatatggtaagtgggtgcccacttctggtatagggtatggcaggtctgtagatttcaagctaaataacaatcagctactcccacgtcgacaccattgatctatattcaccgctcagtttcgtttgcggagcttacagctctatattcggtgtctgatgtctgtctcctcacttcccgccgggacggaatgaaccttgttgcttccgagtatgtcgcttgccaagaggctcgacacggtgtgttggtgctctctgagtttaccggtgcatcagcctttatgaaacgcggcagtctgttgttcaatccttctagtgcagatagcctctcaaatgcgctttacgaggctgttacaatggagaaggaggataagaagaagatgtacgaagagctgcggagctttgtcaccaccaataccaggttagttgtttcctttcatcttctcaaattccctcacctgccatcagaggtccctcaggtcttgtaatcagcaaaactaacgcccttcagtgcgaactggacggagactttcgttggagatttgacgaaattgcaggatagatagcttttagagtagttttaactcttgacattggtcagaatcatttaattgcttcactggtatatccgactgccccaagagggctgtggtacgacgtaagcactatcaggttctaaaatcaaattaaatagtccacgatatcataggctagtggcctccgagatcttatgtaaagtactgtcaagaatgggatatggcccctctaggccctgagcaagaaccttggttattgttatgatctagtggtaaattacgctgccccaattcgtcaagtacagctttatttggtaaagcctgtctatgataggcgcttttagagtgaaatttatatttattttgatacagaatggccactgagatattgaaagtaagatagaatatccagattttgttttgattttgactgttcgatctgaggtttgtcgctcaaccggctggtcccgattacatgacgtcgtcactccaggttagtcgtggggctaggcattccacttggaatttaagatctcagtgacggcctttcactaagatactcatcgatacttttttctcaattctttagggtgcaacaacttccatgtctgatagcttggccctggtgctagttggggatgagggggttgggaaaacagcgcttgcagtgcgggttcgtcatgtatttcccctattttaatcgagataaactaatttcgagtatagttctgtttagagcaatacgccgagggctcagaaccaacgctggatgattcgtatcgcacgcgaatggtggttgatgaccggccttgtgtcctcgagattatcgacacagcgggacgagatgaacatgctgcgctccgtgaagaccacattcgcaatggggacgcatttattatcgcatacagtatcacctcgcgggaatccttctctcacgttcgagcgtactacgataacatcaaggaggtgaaaaaggtcttggcggaaaatactgtacagcagccgccttctgaacacccttgtcgcgtgcctatcatcctagtgggtatgaagaaagatttggaattccagcgtgaaatctcattcgaggaaggacggaaatttggagaatccctagactgttggttttatgaaacatcggctaagactggctcagatgtagagaggacgttcaatgatgctattagatgctttcggcaacagaatcttcccagtcctcctccacagccagcatcgaagcaatcaaagaagggccaaaatgggaggaaaatctatgacccacgcaggtgtatcactttgtaaatatcatagccgtgcagtatgaagtcagttgttatgcagggtttcgatgaataattgctctctcgtaaaccgcataccaattaaaggcatcccatgcagagtagagcgagcagccgcgaattcgggcctcatacaccatttcggccagttggcattcagcgtaaggcatccccgtttgctccggtggtactgtttgaggcacgtcctcgcatcaaggtgcaccatcactgagggtgaggttgccgcaattgttcgaccggtaagtgctagtattagcagccgatatgagaaaatggagggtcatgcctctcgaaggaatttggtatctgcgcagtcgcgggagagccttcgcggcctaaagtgccgacaccatattactcacggattccggcagagtcaggatcggtcagaggggaaaccgagcgtagagcatagtttactaatgacgagggggccctgcagtggggacaaaggggcaccgacagccctgcctgcgaaagaggtgtgagagcagagtcgttgggagtagtacctgcgaccttcctacattatttacctaagcacacaaatatctacgggtggctatcccaatctctttcttacgtgaacttgatttataccgtgaagttcactcaaatatgaacattccacagtcaaatatgcacgaaagcaatgcgcctccgctcctggccaatcacagtccacctttaaccgccatacttgtgccgatcaggggactgcggggccaggcgactgacgcggctcaggatactctcccccatcacactcatcaaaccaaacgaccaagttgagagatggcactgctgagaaggttgtcgcctgcggagagggcgagcggcacggaccgcagcgacagtccactgctgaaggaaccacggagcccctcggggccacggctgctgaaccgcgacgaagttccctcgtggtatggccataatccatacatacgaacgagttataggccagtgacaccgtcaacgtctcggtgccttagcagcctgctgtaccttcacaatgagactgtgaatgtttactcccatctcatcccggctatcataacttcgctgggcaatgggcttctttacttttatttcacagcatcttttccggatgctaccggagtcgatcagcttgtttttcatatctatttgacaacttcggtcgtttgttttggtgtctcgtctgcataccatacttttctttgccattctgcccctttcagtgctttatggggacgtttggattatgttgctattgtattccagattcttggttcttttgtctcggggatatatatcggattctactgtgaaccacatctgcaaaagctttattggtcaatggttcgttgatgatctcaccttgtcggtcatctgactgaatttctgatatacagattggcactcttggcttcttgactgggtttgtcgtggtgcatccccgacttcagagccaaaggtggagactgttgcgattatcaacattcgtcgcgacgggactttcggcatttgcgcctatcatccacgctgctagtatcttcccctatgatcagctggatcaacaggctggattgcgatattactaccttgaagggctagccatcgtgatcggggtcttgttttatgcggtgcgttaatttcccaaactgatgcagaattgatctgattggtggcagacacatttcccggagtcgtggaaacccggaagctttgacatttggggatcgtcgcaccagatattccacatcgccgtggtcattggtgcgacgattcatttgtatgggattttggttgctttccagtggaattatgaaaatcagcgatgccacattggttgaggagatgtattccagtagcttacctgtggactccatcctcccaggctgataagggctggcccatacccaccttcccggattggaagaagatcagctatacacacatgacaaagtacattatgtcgctaaccctaacaacaacgttgaaactctatacagaactagcttagcttggccggatgcacccgatacccccgccccttgtcatttccacttgccacgttttttctcttctagtcaaaacccaaaatggagggaaaaatcgcagtcgtgagttgtctcgtagttgctcggatcgtatctaacacggccaggattccgattactacactctgaccaaagattgggagcctgaggactttcagtcgtgagttgcggatatcattcccacggtgttttggcttttaaccatatgtatcagtgaaaccacatctatcgcctcgacaatcgcgaagggtcggttggaaaatggcagacggtgagtagcagcctgtggagatatgagctttgctaatagtatgagcagataccaggctatgaaggaagatgactattggtcggtcgcgacgcttcaatgtaggaaactcgaggctaatcatagcatacaggagtccttccgatgaccagcaattcgaggcgtttgaaattgggtaaatactcatttttcgtctttcgttcggttcaaacagcttatcggttatacccagtcatatggtttttctcgtgctagaccatgaccgagagaaccccctccaccactctcccatcggcaaatctcctaaggtgagagagcgatctagattgatggcaaccttttactaagagtactctagcacattctggacattggcactggtaaaggaacatgatctatgtaatcaccccacctattctctccaatgaacctcgctaacattcacctagtgatatggcagatatgtatccatctggtacataccacttcctttcttttctcctttgcgccagactaacaaacgtcagcaaccgtccgtggcgtcgacatcttcccccctccggtgacatggatgccaccgaactgcgtactcgaagtagacgatgtcctccgcgaatggacctggagagtaccattcgactttatccacatgcgtctactgctaggagcattcacacccgagggatgggatcaagtgtacaaacagtgctacgagtgagtccctccatttacatttcccctgaacagtatctaactcctatccagcgctcttacccccggcggctggatcgaacaaatggaactagacgtgcgagtgtacagcgacgacggcaccctgaaagaaggcggcgttctagcctcatggggcgataacttcatcggctgctccgagcgggccggtcactccctcctaacgcaggagacaatgcggggcgcaatggagaaggccgggtttgtcgacgtgcaggaaaagttatacaagattcctttagggccgtggccgaaggataagattctcaaggaggttggacagctccaatatgcccactgggttgctgcactggagggctgggctatgtggctgctcactaagtttggtgcaccttcgccttggagtaaagaggaggttcaggtttatctgtccaaggttcgggctgagttgaggaatcctcgtactcatgcttatgaatatgcgtgagtctgatatgttaccccaggaggttatgttgctaattgtgtttagtcgtcgagtctggggtaggaagcctacggcggaagaactggccaacccagtcaagaccgagcctagttcctaaactagcattgaaccgattactgtgtttgcgtttaccgagttcgttttgcgaagcgagtttatattttgcatgtttaagtcctgaggcatgttcgcctcaggctacgacatgattttctacgtatagtaccagaatgtgattagcttgtctgttatcaatcaatttgttaggattcaaccctgggcgtttgctccacgatcaactgagcagccttctcaaactcggcttctacaatcaagttatctaacccagatcgttcgacctgcaatggaattagccaactctcaacaacgaacaggttactgaccagctccagtcccttttcggaattagttccctgcaaccgaaccacaaccggacatttgaaaccacccatctcagcagcggcggcaataatagcctcggcaatcatgtcacatcgcacgattcctgcccctgatcagctccatcccctattgttaacgtgtatactcaccaccatagatattaatcaaaatccccttcacccgttcatcattcttcaaaacctcaaaagccttcgccaaagcctccttcgtcgccgcaccgccaacatccaaaaagtccgcacacttccccccatacaaactaatcaaatcattagtcgccatcgccaacccagccccattaacaatattcccaatattcccctctagccgcacataattcagccccaattccgcaagccgatgctcctcctcctgttccggcgctcgttcctccatcgcaaaaagcccaggctgtctatagctcgccgcattatcaaacccaaatttcgcatccagacaaacgaactcaccatcctcagtgcgcaccagtggattcaactccagcaacgtcgcgtctttctccttgaacagcttgaacatctgcaccagtatctggtggatatcccccatctcggaatccgagaatcccagctcggcttggagatactcgtcgatctcatcagtgataccggtcgagagtccgaaccggagtttatgcagcttgtcgatgttcgactcgatgtttgttccgcctgccgcggagatgagcagcacgggcgaggcgtgctggcggtcgaatgtcattgcaaagtaaaattcctgcgcgatggagatggcttttacgatgtagagcttgtcgacgcgaaggccgtcggctggggtttgtgctgttgttaggtagtacccgagcatgttggcggcatttttgaaggcttcggttggactgatagcggtttattagattggttcggtggttatttaggattgggaactcacgactcgacgtgtcgaacgccgctttggccgtcgctgttgaatttgcctttgccgcggccgcctgctaggacttgggcttttattaccgatggtccatctgtgaatgttagttttaggatatggaatcgaagaggatggtgtgaacttacttataacggagacgacatgcttggcttgctcgggggttgtaactaggaatcccggtggaactggcagtttgaactaggttgtataagcattgaggtaggctgtgtttgtgaagggatacttacttcttggagcagtttgtgtgagtggctttcaagcagactcaactgtcgtacttgggctttgagaggtgcatagtgctgccgatggttagtatcgtttcaatcactgctagattgtacgaacccgttggaaggtgcgcgcgatcgaacgccaagcaatcatcgtgagttatatctttcatgctagggtgtcagctgtcagctccaagaccattccgaggttcgatttatgtcttttgtgttatttggcgatgacatcaatgtatcgattttggctagttcctggggttgagtttccggaagtttatttgatatgaccatcgcttgaccgtgatgatttcaagtattttcttggtgcaagtatcgagagagcaggatgaagacttcaatatagacatgctcaagactattacatggccgagtcaattggtgagttctcgacacttgatattgctcgacgtcaaccgctagcaaaatacgtcactgatatcgaatctttcccttctacatcaatttaatcacaaatctcattccaaatatggcttccttacaacgaatatctaatctctgactccgagcctgatatctctctcccaagcaacgatacaataacctacgcgagccacacgagagatatactctacggacagaagtcggcgctagtgtatacacatggccataccgtgaggtacttcattgtagtgcaccagccgtaatctgagcggagactggatcctctggctgtcggtccgttccgggccatcgttcgaagagggcaatctcccgaattcctcttgataaagcatccatacgggatttcaaggataaacaatatcgtgtaagcggggtacaaggttcagggattagccgtagcacacatcacattaatgataactcggcgcatcgcttgtcaaaagtgggggtggaattttattccagtcgtcccaaagtagtgtgttggcaaaactagcagtttcaggctgcgccgtttgcttggcttctcgtatcggtccgatggtaaattcgccagaagatggaaattggtgaattgctttttttgcacatcgtcacgcgaccaagtcgcactgaccgcggggatggatgatgcgatcggccgcattggggccatagcgctgtcattgcaggtttcgaagagcctcaatctgtgcgcaaaattgtgggaatgtttcagggaaagtcttgctagaacctgttatggttctggaattcattttttcttgaaatgtggtgtaattcgtagtggcccaatggggatgtgcttctcacaggtaacgagaagccagtagttaaatccactagttacctttcttttctttgttaggccccaaatgctgtatcaatctagacatggtctatgatgactgtgtccgttgcctccgggtggctgcaggctatctctctgtctgagtaagacatctaacctcgagcacggcatcttactgtcaaattggtcaattagtcaagtctgtactcatctgatcgttcccaaaatctgacagacactagtaccaagaatgttttagcagtgtttcacgagtactccgtatgttgtatatcgttttcttcccttaaatggagaaataaggccccgcttctttgtatgaaccccgtgcttttagaccttgacagccctcacgtaagcgacggggcgcatcttgtcccgaaatgagactttcaatagcctcacgctaagaattgtgtaagaatacccgaccggccgagtcgcggagaatcatacccgggttcgcctggatgtatgccatggtcgatgcctgtagataggtgccacgcgggtaatcggaatgcgcgcagcgttcattcgccgacacaaatgaagtcttggcttcgagacaagcaatggacgtataacctgataaggttaaaccacgttgacttgggcgaaggtggaaattgcaacgtgggaggctatgcctattcgggcttagtcaggcgtgaccagcctccaagacaccattttctcccaattcagagatttcaatacaagttcatatgatatcagcgctagtgacgagttagtgaatgcaaaatgaaatcataccgagatcgccaggggtacgcaccacggagaatatacacagcaggtttggcttatcaccgtgaggcttagataggcgatcgcccctgagagcccagccacccagtgggcctgacttggccgacgcagagtttctggcaaatcaaaaggcaaagaaagcacatctgatcgctcgattctgacgctgaattttgtttagaaatataagaaaatggccatttcctgctgatgttcctgcaaatctccctcagtcatccgtcaccatgaggcagtcgacacccattctctgggttgtccaggcttgtctagtatggctgacattggtatcggcatcgcctgtcggttctcctgatctggtatcggacgtcgcgcttcaggcccgtgacaccaagccgtttccactccggattctgcccctcggtgcttctatcaccatggggtacaaatcgcccgatggaaatggatatcggaaatggcttcgacagcaattgcgctatgcggggtgggaggtggacatgattggtactatgaagaatggtacgatgcatgataatgtgagttacggttctgttcatcttaagaatatatactgactcttcaggaccacgatggacacgtcggctggagaatcgatcgaatagctgatcatgccaagacgatcatcccacaacaacctaatctaatccttctcaagtgggtctccgattgccgatgccatctccttgcatgctaatatgtatatccccacagcgctggcacaaacgatgctctacaaaactacaaagtaaataccgccggcgagcggatggactctctcctcacttacctcttcgacaacatccccaacacaaccatcatcctatcaaccctgacatacaacggaaagaagccgaaacaaggcgcatccatcagctcgcaatacacggaacttgcagcgaaacgccgagcgcaaaacgacagcctcgtcttagccgatatgagcaccttcattcggtataaccaattagtggataagatccacccgacagccgcgggctacgaggaaatggcgtccgtgtggtgggcggccatccaacaagcggagaaggaaggctttctcaaagcgccaaagactacctctacatatagtggtacgatcagcaaggcccgcgagaaggcactcgacgatagcacttcagacccggatctgcctgcgtacacggccccggctcagcctaccgtatcacttggtagcggctcgcctcgagccgagtggcatctctggactgcgttccagattatgagtatgttccctttctccctgtgtgtttgacaagactaaccttatcagtgggcattggtttctatgtgatatgatgggacctggaacaaataatcaaaaataggcaaaacaatttaaaacttactaaatcgttcatcccagcctcataagaggcgtgcataagtctaggcaaataagccatgctatacctaacctaacgaaaccaacccaatttcatcactaaccaaccccattaatagaagcatatcctcttattaacctcggaagcacgcagcctcccaagaaaagcacaagcagtctccactatcctcggcctcgaactccaaccctccctaaccctagactctggccgacctcttcacctgtccccgcaataggctgcgtcgtccggatgccgtgcgccagggtacaggtccaccaaatcagaggaataatatagccgacatatcgcagaggcgcggcatccgggttagtgtggggtcgctgttaccgcgtggcgctgtcttggagtgtggctgcgatgggagttcttgacgggatgtctatgggattgcaccatttctaggcagatcaggttagttctagtgctcggaggaaggatgttgctgtacggggaaggccgggagtagctctcgggtgtctcgttctgaattcttttggggtgggtttgccgcaaaaggcccgggcgtgtagctatccttgcatggatgtcaatgcgcgttaatcgcatgtaaacttgatcacataactctcgccaatgagataaatgtagacgatggacgtagaaatcatacaacacacccggaatgtgagcgacagcaatgtcaacccgagaaattcccggccccgcggcccggcgacaaagctgaacttccaacctgggacaccatgacatcaccacctaagctccgagaatattatttcaagctcctacacttccgcacctacaacatcctctctacagacctctaaacctcctccctctatccaatccccccaaaccaaacccaaaatggccgaatcattcgctatcctccgccaacgccgctccaacgagctaaccagcctcgccaacgagcacctccaacacgacctcaatgcggaagaccgcgacaagctcaacgcagcctcgagatcaatctccacgtggacggccattgggtccggcgtcggtattaccctcggtcttgtcgccgccatccgcttccgcaactcgcgcaaggcgttcttctcagccattcgcgcgcaggatagacctaccaaggttatgtttgaggatggacggactggtatgttattttgattgtaatgaaacaaagatcggtattaatttgtgtcttgtgtgtagaggctattccggacctcacgccgctgttgaagcctactactctcggtgatttcgcgacttatttccttgccgcggctggtgggttgttcttgggtggagagcttggtaagattgtcgatcgtatgatgccgagttgaattgtgctaatggaattctgtaggctttgctggtggtgtggcgaaagggacgtggagtctcgatgcggatccccagagcaaggagagaattgagactgctttcaggaaattccgcgctgatgtgctgcggaaacaggctgatgcttttgataagggggagaataattcctatctcctctagggaatacatgtagacataaattggatcttaggtgtacacgattttgtaagatgatgtcagttattttcattcgcaatgtcacagtaatatacaagttataccttcaaagccttcaagaatgccgggctctcatagccctgcgcaaccttcgaaatcggcgtgagatacgcctcggacgattcctggctttcctggatcttccgaacatagaattgcgcaaccttgagccacatcgccttctcactcgcactggcttcagacccctgccaaacccagagtctgttcccagcatcgtaaaggaagacatctttaccatccaagtcagaccgctcaacccgcccatccttaacaagatcaagcgacaagtccccagcagcatcactgagtctgaacagcctgcgcgagcgaacactctcatcaacatccttcttcgcaaagcgcccaggtctagccgcctccaacgtcgatggcgcgacatccctcccacccagcaaatcaacaaagatcttcgacctcgactccagctgcgacagcacctcaacatcaacatgcttcgcctgcgtcatatcattaaccacctgcgccgccttcgccttctccatcggactacacttcctcccctgccaaacccagatcttatcccccttatccaaaacaaacacatcattttcatccagactctgccatgtcggctcgacctcatgcacgatcaacgaatccacacgcgcaatgcctgggtgtttaaagatccgcagtaacgtcagaacatcctcccgcggctcgtgttcgacatgcgtgaatcccgagcgcacaccaccagaccggaccgcgtaattccggaacaaagcaaggaactcgtcagaagggtgttcctgcacctcccgatgctgcgtcgccacgccgtgcaggaactcgtccagctcggcggtcttgtaagccgcgacgccggcttcgtcttgtgtggtcttgctaccgagccagaagaagatgtcgtaggcgagcttggtgtcgaccttgtacgtgtgcagcacgatgaagctgtcgccgtcgtagaactgcccggttttggatttcggccacgggattacttggaagttctcgatgcgccagatgctcaggccgggttcttgggggaggtcttgccaggcgggttcggtgagggcggagttgtacttcacgcggtggtcgatgtcgctgccgattagctcgacgttgctgtctttgatgtcgtattcttttgggtggatgaggccttcgtggggtgccatggttgcgattggtgtctggtagctgtgttgtgtatgatacaattagagctgaggtgagtgttgataaatgataaagtgatgatagcggtgggtccatggggctgagccgcggggcatcattttttgggagcaattggccaatgacgtcgggaatgttcgagctactatttttagtcagtgcaacagacgtgatgctatgtttacatgaggctggtagctgtgggagaggctggatagagggcgcagtaggcgtttgagccaccatcgtggcatgtcagaagagatttttcatattttcgtcatccgttggtccatctgagtctgatttcaattcagaaagtgctggtgacagctacagctggatattaggaagagctcatagattgaacagcgaggttcatttgagtggacaaaatggaagccgacgataccaacgtgtcatgctatgccctgacgaaattttcagcagaaatttcatgcgcgagaggacacgcagcaatgtatcccacctttggggctaggtcgaggtgatatcactaatagatgtactccgcacaagatgctacattgatcaagtttaatcccaagtcctgcagcttgcatcaagtcaagtcagagaattctcaaatcctcatttacaaataaaaaccaattggtgtaaatcagtgcacgaatcgatcggctctgaactgaaattccaaatgtcctgaggtatatgaaacaccgagggaaaatagtatctacttctcataactctagtaactgctcgtgcctgatttcccagacgcacaaagcaccgttaccaacgctaagcgtcaatatgtcacgttttttctcgctcgcataaccatcgcgcacttttccatatcactgatcacgtttaccaacggccaccaccggcaccgccggcaccaccgccgccaccgaagccaccaccaccgctggggcgggcgttggcgaggttgacgcggatgcgacgaccatcgagactggattgtattagctgtgttcgtagtatggaggagggataacatactcctgctcgttaagagcgttgatggcagcctcggcctcctcagcggaagagaaggtgacgaagccgaatccacgggagcgaccagtctcacggtcaaccatgacgatctagagatggaacattagtgtcttgttccgaagcaaaaattggaaatttgtggatttttcacgtacagagtcgacaatgttgccgtactcaccgaaggccgcgcgcagcgactcgtcgctggtgtgccatgaaaggtttctagtaggactgtcagtataacgcgtccagcatcggaatttgatggttttggacatacccgacgtagatcttagacattttgaaagaaagtgggagtcacgaggtgttgatgaagagaattaaaagatgcggggcatctgaggagatatagggccttcgtggcggtgagaggcaaaattcattcgccccgcataaaaaagtgagcacgtattgccaggaggcgaaggagcagactctgccggatagaccagctcattcaatgccattttgagattggtctaattctaagcattctgccagattactattccccaatggagtctcccacataggtagctacatatgatctggtcttcctggacgcaatggcagaatttctagcgaacaatggcctgacggtactggaacccgacagaactaccttactactgtatgatcaacagacctgatcttcttactaagatggatcatgcattcgagcatggagccacagcgccaccatctagaccggtaggatgaggtacagaagtggatatggtcaagtcaatcttgcatacgcctccgatggaagatacatccgtatgctaaaaaacagcttccctacaattctccaccatctatctgcacgagcaaaaacaaaaacatacaacagtgaggattcgctggtggtcacccacccaactactaactcaccggcgtgtggcttaagtacggctgagcggacgggaagccctgttttccacaccctatggtcgtatgtatcagattatgtttcgaggaggattatagcagatggctggtgagtgttacgtaggatgggcatagtgtaggagccctaatttttcggggatattcacctaggactctgaatgggaagccaaagctatggagccactgatgagcactaacactaatgacggtaaggatatgttagtcctgcccgaactctcaaatatcagtgatgacatacctatcggcgagaccgctttttaatcatcttttttgggtgtagtgcgaaggcaatgagatgtaatcgtggattgcaaaggcgttgcagcggcttctaaggtatgaagggtgctatagagggatagtagaagcgtgtgagattcgtgatccgcttttcgatgattatttctcgactgtgcttggcttagcggcacagtctgaaaagctgagcgtcgtacctatcgatggttcacttgaagtggaaacgacgatggaaattgacctttttatgggtagagatgaagtttagagttttagcaaggcaaggccgggggtggataatatctcggatatagaatagtaaaaagaagctaggaagaatgaccgaaaatcgttctggatatccatcatgagttggcgagtgcgagcgaccaaggtcgaagtggtaagaagatgagaagaagatgaaggcaaaaatggagctgtgtcgggctaatgcattgaaaataaagtgccccagaatgatcactttagcggctgtggaaccgacaagtcgttgacctcttgaaatcgcgggaaccctggaatatgtgctggctagcatgcaaaaattggagattggctttgaaagacttgtaaatgtaacgtcatggtcatgaatcttggtcggcaaacttcgcagttagtctatctacgctaggcccctcttcactgaagccggaacccaagaacttcaagtatccccgagattcaaagttgcagccacgccacaaactgcctagcagaccttctcgtctaggtcagagcattcctggagacgaggagtctcgtctgttgttgggaggtgagaagaagaactgggaccaaatcgagaaacaagaaatgagcagagtaaaacagggagtccggagtttctgcatcaaaatctcctcgattccatctatcctttcccggttcatcagaaaacgccctacaatactttccctagaagagagtgtcttacatgatatctacaagcatcttcccctggtcgataaagcgtgtctatcgcttacctgcaaacaactttacgatctatttggagcaatcttgaaagaaaaggaattggaattcccacgacttttactcattggtatccctatactatatgtgaatagtagcaaagtcccacgaaatcaactgctccttcgacttgagagtcgcaactgggcatattgtggaaggtgtttgaagctccatccccgaaaggaatttattcgagagtcgctcgcgcgcccagctttagagaggtcttgcgcagactatgcgggtatagttgacctatgccggtgtgttgccttgacgattcgagacctcgggtctattgcgaaactttttagtcgccctacgccgggtcaaactaagttcggtccattcactttttaccgtattggatcttggcctttcttgagacactcttgctcattacccactacacctgaatacaaggctcggttcgcgatgcgtatatccatcaacgagtttaaccagctggagatgtctgctagttatagcatattcttttcttcccctgagactctaaaagccgtgcccatcttccactgtcctcactgggaccttactactttgatgggtcggaaggatgccacccaggtgtgtcctgggtgtcggaccataagtataagacatcgtcttccagaatccaaaggaaggaatgtagttgttttcgaagtgtggcggattttaggaaaccgtagggcaccggattaccgttggcttgataactgtcgtctcactgggccttcatatggacatgatatatccaggtaagtgcatggttgaatattggactgaatgggcttaacagcattattctagggaggaaagctcgcaaagtgggacgcgcactatttatgatacatgggagggtaaataccatggagcccgattttgccaacaggtatacgggccaacaccgacacttgattacaatatggcaaagaaagtgaaaatcgcatacaagcatgggctcatttaggtagatacagtcgaaggggactgcaggaattatactactcgagtgttaaattgaggtaacttctatagcctctttgctattgtatctcttttgggccttatttttccaatgtaactgccagcaaaggtattgctatatactacggttcatcttcttttctttctgcgcttgtgtcttgtaatacagctaatggctttgggacatgtcatgctggagcggatgtgttgtttcggtctaacggccaccacagccaggaggtcatgtaatcacttcttgatagagcatatgcatgtacccacgttcaattagaaaaggcaaaaattatgtatttcacggtttcagtctgcgaaaaagggatggcctataattacatgagttaaaaatatcggatagggcgcagaaagctgaagccggtaggttggtgatgctatgcattgaagctaccatattcttttacttactgtgattccaatatcgttcgaatattattcagcttgggtcttcatgcggagagaaaagaaaaagttttatcgagatcaaaatgaggcgttgggaaaattccaaccccaaatatgattatcgtctctgtgtagaattggaatgagagttctaactatatgagagaaaggaggcatatattcttcatgtttggcttgtaatgcacaattccaaatattgggatatatgggctcattcatcttcatcgtcactccttgaatatattttgaatatattctcgagtggtcagaatagaaaggacctaatagtactatatacaaagccctctgatcgaactagtgcttggataactccttccaatcaaacccacaatgcggtggtacaccactgtgactagtgagggtgggaacagcatcggctttgtttatttcaccgcatccagctagcaacgtgatgaaggaaatgaaatagttcacttttcaagagaattaggacattggcacaggctggagattatcaagtcgatgataacctagacagaacagtgccaatacatcgtcaactcatacaatcagccccaatattatctgcatgctgttgtaggtgaacctaccggggagaattgtgagggatatgacgaagcagtcatcgttcaaagaggccgacctgaagaaaggaacagcgggtatatttccgccaaaccattcacgccctgactctgcaagtcgaatgcaccggagtggaagcatcagatctagatggaaagtgtagctcaaaaagaataatgtcacgagttctactccggttgattatctcatctattgcccggatggtctagtggtacgttgcagtctcttcctcaagtcataaatttccttgctaatcccttctaggtggctttggctttgacaccgagattgaagcgtcgtatgaaaaggagtgcatgctcatagtcgtaatacatcgggtcactcgaagtactgtttcatcttcggctttttctatcacacacataggcagtgcctggtgcgatgcgttttaaaagtctaagtagatggttacataaattatgaatccgcctcataatctatcttccgcccggatggtctagtggtatgattctccgtttgggtttccatctcaaattcggagaggccgcgtgttcgaatcgcgcttcgggccctcattctttttttgtttgtttttgtttttgcttttcattatgcaatatccacctctaatttttcaccctctgcaatcccactacattgactgacccttttagctcgatgtctaagctatcacgatctagctccaaaatacggtgaggtgtctacgggctactgcctactccgtacacggcgaagcgtccggcaacctgcagcgagtggacggaaatttccccagtctgcggggaaagcttccaaattacgtacaagtttagctgttgtcaaaagcaagaggttcaggctatattccagaatacatagccagccagtctttccacattccgtgtctcactcgccaataaaagggagtggtccgaggccatcgtggactaaccatacatagtattaacctgcatgtttcaatgtgatatatgacaatgcaaccagtcgtgtgtcgctgtacatgcggagctcaccttgcgctttcttggccagggaaaaaccccttcattctagtcatgggttccaaatctagaccttggccggcgttggagaccaggggggaattccaaaccacgggaatttaaacccaattctcctgtgcggggattataaagggtgtacctgcccgccggcctagcagtaaacattgagcgaccacccacagcaaacggcgtgatgcagaacctttttctctctgctctggccttcagtgtcgcagccgatgcctatggctcaggggctgccggctgggacgcggcttattcaaaggcccgagcggtccttcccaagctgaatcagaccgaaaaagtcgggattgccactggcgtcggttgggaaggagggccctgcgtgggcaacacttatccagccagctcgatcaactatccctctttatgtctacaggactcacccttgggaattcgctttgccaatccggtcacggctttccccgccgggatcaacgccggagcaacttgggaccgtagtctcctgtacgcgcgcggtgttgccatgggcgaggaagccaaaggtctgggcgtgcacgtccagctaggaccagtcgctgggcctctaggaaagaatcccaatggcggtaggaactgggaagggttctcggtcgacccgtatctcagcggagttgccatggaagagacaatccagggtatgcaagattcgggcgttcaggcctgcgccaaggtacgctggcttccactctgttcatattcagtgcgttctgaccatggtaaagcactggcttgggaatgagcaagagcacaaccgcgataccatgagctctaacatcggcgaccgcgcgacgcatgagttgtatgtatggccgttcatgaacgcagttcgggcaaatgtcgcgtccgtcatgtgctcctataacaaattgaacgagacttgggcatgtgagagtgatgctatcctgaacgatctaatgaaggacgagctaggtttccctggctacattatgaccgattggaatgcgcagcacactagtgtcaacagtgctttggctggactcgacatgaccatgcctggcagtgattttaatagcccgcccggcagcatattctggggaccaaatctcgtgcaggccgttgctaatggctctgtacctcaggcgcgtctggatgacatggcaacgcgtatcctggcagcttggtatcttcttggtcaggatcaaggctaccccgaggtgactttcagctcttggaatggcggaaaagccgctgccgatgtaacaggagaccatgccactgtcgcccgcaccgtggcccgtgattcgattgtcctattgaagaatcaggaacatactctgcctctacggcaacctaaaagcctggctattattgggcaagatgccatcgtcaatcccaatggtcccaatgcatgtggagaccgcggctgcaataccggcacgctagctatgggctggggcagtggcacatcggagtttcccgtaagcaagccaatgccggcagatcaaccgcgagtccgataaactgacaatgacgctctagtacctcgttggtcccctcgacgcaatccaagttcaggccataaaggatggtacgaacattatccagagtacgaccgacaataccacggctgctgtctcggctgctgcatcggcggagactgctgtggttttcattaacgcagacagcggtgaagggtgagtcggacttgtaaccgcacctatgatgcattgcaactaacccgtgcattgcagttacattacagtggagggcaacgttggtgacaggaacaatctcgatccctggcacaacggaaatgagcttgtcaagtccgtcgcagcagtgaacagcaacgtcatcgtagtcgtgcatagtgtggggcccattatcctagagaccatcctagcgcagccctcagtgaaagcaattgtctgggccgggctaccaggtcaagaaagcggaaacgccctggttgacgtgctctatggcagcacctctccaagcggcaagcttccttacacgattgccaagcagttttcagactacggggccggctggaacagtgggctcgatgacaatttcgttgaagatttgtttattgactaccgccacttcgacaagaacggcatcgacccgcgctacgagtttggctatggcttatcgtatacgacttttaattacactggacttgtggttagcgttgctgccacagctggggcatcaaatggacgaattgtccctggcggggcagaggaacttttcgagtcggtcggcactatctctatcggtgtcgaaaacactggcgaggtagctggtgctgaggttgctcagctctaccttggcctgccggactccgccccaagtactccccccaagctgctgcgagggttccagaagttgaatctccagccgggagagccgggaacagctactttcgagctcactcggcgagacttgagctactgggaagtgcagacacaaaagtgggttgtacctagtggtaccttcattgtctatgttggaacctccagtcgggatattcgtgaggatggaaagttcactgtcacttagtgttgttctcatgctttggcttgtatatatttttattcggaaacgacttgtctcttgatgaatctgcaactaaaccacgactcaatgtatcgacagtttctagatccagacttgcttctttgttaaggttcgtaagtctttacccaatgaatgaccctatccctaagacaggtttctgtggggtacaaagaatgaaagaatgagctttgtaactctcccttttattatcaatgatcatagtattaagcaacttattcaaatgtatataataacgattggtataaataacatgttagtccttctcgaagtagcaaaccatcatcatcaataccttgatctatctcggcgactaacttatacagatccgcctgtcctatatcatctcaacgatttacccatctccaagaacaatggcttggtggaacagctctacacccggctgggtcgaaaatctcgtaccgacctacacacaagaaatctacaaattccgactcgaactcgaaggcgagattcagattctagtgcgccacccaggctatcagcatatagtaagccagagacttacgatgacagctagatccctgcgcaagatcaagacactggcgtctgatatctcggtgtatttcccggaccatccattcgtcacgcgcaaacgccttggtttctttcagactactttcccccgactttgcgattttatcgagcggactttgattgagctgagtagaaccctgattcatgatccgaaaagtgagatttctattgcttggcagcttcaggatatattggattctgtatagattgggtatttaatgtttcatactattcaaaatacttctatgtggtgaatttgattttatttagactatcagcatagatgattctacttattctcgctgttgagtcttttagcagcctcatgcatgtcatggtatatatttcaagcctcctattcccgaagttttcacaaccattgtcaattcaattcaatcctatctctagatttcgcctggaataattgctagcgaaaactcacggcatttgaacaatttgattcgtatctttttcgttgatttataaacatcccacaagcttggaatgagagtgcaaggaggctgggagtttgcgatcaaccagcccaatacaagtatgcgacagagaaaagccccaagacttggatttgacatgaaatctgtataaacaattttagtatatcggaatatagtgattttgaatgtgttgttacaaacttacctgccaatagtactgaggcttcagaaatgccgtggatgattatttctacaagtctaacaactattctcgatcatgtacaattcgaaatacctcaagtggaatgtccttagtaggattcctcaaaacaatgatgtccttcacatacaaggacaagacctcgcgtgagtccaagccaacttagaataatcccaagctaggccgacacgattaacatgcatttccactccggtcaattgggattcttacttccaattatatctgcctgtctgtttgcttctgtcgaatctaaatcttcggaacatccaagatcagccttcacatttgaccagctctggaaactcgagaagggcttctgggattcctttctctaccctgcaaatctcaaacagacgcaaggcaatgcatcgactattttcgcatcagacgtgagtttctccagtttctccctctgataataatctgacacattacaggtgcaaggtcgtgtcgacatcacccgcaccttcgatggcgacgagctaaaccgcgaatacatcttcggcctattcgccgatccagagcacgtcagtcttgtcggtgtcccgatcgcatataacatcactcaatttactgcgaacgacaacatcgcatccgcgacaaccgttgtcaccttcaacgcaaccagtttcggcgtccttatcccagtgacgatcgacacatggatcgagttcaacgccgacggcaagatcgcgcagtacgacgcaacatttcgctggtttgagtacctactggacttcttagtcgaaggagtcgcgacaaaaataaacgcgactgagcccgaccaggctgttgcctatgttgctgatttgctagccaccgcgatctgtgatacacatgagcagcattgcacgggttcgaaccagcagtatacagacaccgcaagttgtcatgactttttgaccaagactgtgcgatttggaaaggcccacgagctgggtcgtaacacattgctgtgccgcgaggtccatgagcatatggtgcagtaccggcccgatgtgcactgttcacatatcggtcctggtggcggtggatactgtgttgacgatatggactacatgcagactgtactagaaaggtacttcaatgactcttggattccgtttgggtatgggacagatcagaatatctggctcgctgattgatgggagaggcctgctggtaaatgtgggggaaatgatacgaaaatcgcgtcgacaaacccaacgtggtgaatcaaccgagatggactgcgacaacaattatgtcactcttcaggtctgcagtaagccatgatcccgtgtcacaagcaaattgaactcaaggttttcagaaacatgtactcgggtccatgctctatataccatatgtcattagaatcctgcgccagccaaatatagtatcacgatcttctaggagtgtgaccacggggaactgctaccgaactggggtgataacagattttcgcggaccatagtacgggctcacggacatcatataggcatgccattatctgcgccatcttgcgtgctatgtcacatcagacacgagatcattggcgcttttatagccccttgatgataaggcataaaactcctagctcatcctcagcctgacgtggcactgcactacgcggagttgtattgaacaaggggctgtttactgatctgcagatctgcagctcggagctttatgtgtgatatcataggatatacatcggcacaagtctccgacgtctccatcctgatttggcggcgatcatattttacattccaatcccttcgcacgtccgtttctagccgtgtttgatgctgccccagcttacaatcctccgaagagctctctattccctacgtaaagcacgtcagcgtcggccttttaaaaacgttgttttgtttaaagcttcaaagtaggggttgggttcaatatcatactccagcaagtcacattcaccagtgcgttatcataagtacatacactacatcgggatcatctgcccagcccgattgcaaaatcagcgatgtggttactcacaagctaccacccgtgtttgaggtagatacacaagtgtataattcccgctcggccgttgaagttgcatgccagccttattagtctacgtacggaaattccttccgtcacctggctgatctttaccaagcgttctcgccatcccttcgaacgctagacctccttgacatgatcaaacaatgtgaccataacttatggcttaatttagatgcagttaaaatggacacattcaccgttagaacttgcttttttgtctttaacgtccctgtctatccagaccacagaattcaacatcaccaatatggagagaagacgcccttcatgcagcgactcactgcctcgcagtgaagcacagatacgcttgttccccgagaaattcgacgaatcgtccacggacgatagacaaaagttaccacctgtcgacggaggtttccaggcatggatgttcctgatggcttgtgtaatgttggaggctttgatatggggtaagtcagcttgcacgactctaggagatgacagccgactaacatgagcaggatttgcttttgcattcggagtctttcagaaatactatcacgcccatgaagccttccaggactctaacatggtagctgttgttggaacatgtgctacagtgagatcaccaactgcttacgacggtctatgctaacacaatcgacagggaatatcctatttgagctgtccactagtcattattgctatgatccttcttcctcaatggggacgctggttctcatctataggagtgataataatgtgtctttccctagcactgggttcattttcttccaatatcactcacctagtcctctcccaaggagtcggcttcggcatcggcgggtgtatagcatacagtccatccatcctgtacatggacgaatggttcgtccaccgacgaggactcgcgttcggcataacctgggctggctcaggagtatccgggatcatattcccgattgggttagagaagctattgaatcgctacggattcgaaacgactcttagggtcatctccgtggtggtgttcgttctcgctgcaccttttatctactttcacaaaccccggcttccggtcagaaaaacagtcgactatcaacgtctgaacttccgcttccttaccagcaggatattttgcgtctaccaactcggcaacatcatggaggcattggggttcttcttgcccggaatttatctgccgacttatgcccgtagcatcggcgcctcggattttctctcctcgctgaccatcacgcttttgaatctggcgtcggttttcgggagtgttactatgggccatctggcggatcgataccatgctgtcacctgcattaccatctcgactgtcggcagtacactggctgtattcttcctctggggatttgcgacaaccctgcccacattgttcgtcttttcgatcgcatacggtttgtttgcaggctgttactcggcgacatggtcggggataactcacgaggtccgacggatcgacccgtccgccgacgcaaccatcatcttctcggttattgcctttggacgaggaattggaaatgtcgtcagcggccccttgagcgaggctatactcgaggtagatccgtggaagggctccgcagcagcgggctatggcagtggatatgggctgatcatcttgtgtacggggatcagctgcttgttgagcggagtatgtatagtggcgcattatatgagatgtatataggcgggtctcgttgcacatttatgctgatgattaacgtctgcttttggtgggacaaaggatggttaagatcgctacatatgctactgtttcgaactgatgggctgccagtctatcagttattttcttttccctttgagcatgacccctctatgttcaattccaatttattttatgcatagctcgatttatacaaatctcggaaaggcttgggatttccctgaaaagttaaattgcgatatttatagcggtccgccagcatccgggtgcgaaggagtatatcattctactcgccaccatgattgctagacatttccatgccgatattcagggactataatgctagtaggtcgtagatttaagatcagaactagtcatgtaagctttaattctatgcaacagtcaaagttttatcgacgccatcatccaagtcaccggggtcgaccgggtaccctgatgatctcacccactccattttggatcttgaatctccaagcgtcgatctctatactcttttatatcaaaatcatggcccaagcttggcctgctcagtggtcgacgtcatcccacaaggctacggcaatatggattccaccacaccctgctctcacaggttgatattgtggaccatgacgccaatccagaggaaacaaccggttcttcaggaagtatacttcaattaacatactcggaggctgccgcatgcgttgcgggggcgatcatgactctagaagactcggagattgcgcggttttatgggctataagggtatttaactacccatgcacgtagctagtcttctgttcttcacaaaaccttacctagtcactctataagctacctctataagcctcctcttcagagaccagattactccaagcgcaatgcgtctcaacatcgtcagcctcctcctggccggagtcaccgccacctcggccgccactactactgctgccgcaggcgcagcctcaacctgcgtgccctcatcttctgataccactgtcctccaattcgccctaggagtctccaacttcatcggcggctggtacaactcgaccgtgaacagcaccttcggcaacaccaacaacgccacccttctagcttatcagaagatcctcttcggcctggagaaggacaacacgctatccagcgccgccatcgagaaagtcggcgccaaggcccccggcttcaccgcgccccagtgcacctacgttttccccgaggtgaacaccacccagacctgggcacagtgggcctaccgcttcgaagacaccgtcactggtgccttcatcggccttgccggctattccgactcccccgaggtctctttcctcctggctcgtctggctgcggagcacagcgcgcactctgctttgattggcagccgtgtgaactctacctactttgcccagaacactacttctctggtggcggcttacggcccggctcagatcttgtctactcgtaaccagactggtagccttggcgcgtatctgggtggttgtcttactgcccctactagcccttgtggcacgctgagaatcggacctttggatgctactccctctccttcctcttccggtgtggcgagcaccagcttggctgctgccaagaaggcttagaggtcattggttgaatgaaatatcaaactttgggtttgatggaatgttgcaaaatataggattgtgtattaatttggtcaatttgaggaggaatatcgctgttttaacagaacaggatgaatatatgacatgattaatggattaaatgggaacatgtcatgacactattgttctataactacatctggtttaaatttgttaatagacctcgggaaatcgctcgttgagtctcgagttagacagtcaatcatgatgtcaacgaccattaaaggaccaattgaatataaaccaagtattgtttgtattgcacactcatgaaaaagatacctggtttattacctagaatatttacaatgtcgtaaaagaccccgtctgctgaagattcttaatcctcccaagcaagaactccaactgcctataagccgcgccgggagtgtactgtgggatctcatgaccggcagtatagaccgagctgaaggtcagaccacgctcggtatgggccgttccgagaataccgccaccggaatcagcagtccaaggcgtactccccgccccattagcaatatcatcgagagcagtggtatacggcacaaacaatggcccgtcaggaggtctctggaatccctgcgctccattccaagtcatattctggattgtagcgagggttccgttggcgaagagcagataatcgtaccagccatggccgatgaggacgttattggtgcgctcgatgacgctagggaggggaccgagtgcgctgggaacggaattatcgccgtcgttgaagattcgggggccgcagactgcgtagtttgttggtgggatgttgagggctgcttggacggcggtgctgttgaagtagttgttgggtccgccggctaacgaggggaagcccatttcgtcccagaggaaggggcagaagtctgttaggtggtacatgttgaagcaggggttcacgtagattgctgcttttacgatctcgtcccagacgtcgcagccgggcttgttggggtctggtgcggtcgggaagttcttgggtggggggtaggttagggctgtgtctaagaatttggtgtagccgcatttgtcggcgcggtggttgatttctgtcatgaaggtgtcgttcagtgcgaaaatggaggagtagtggttcagcgctgccactgccggggctattggacatggttagtatgaagatttttgtggtggagcaacaactgaccatagatcataacatcatcatcattaatggaagggtcgttaatctggatgcctttgaggttgaaatgcgtggtatcgttgcggtttaacatcccgtctgccagatacggaatgtattggcccgcatagctctctccagtgaggtaaatcttgtagccctccatgctgaaggttttaatgaagcgctcccagaagtcgttgaattgattcgaaacatcgatctcattttcaaccgtggatggtccgggggaaaagcccgtgctggcaggctggtcgatgtagacgatgttggtcaatttggtccatgagtacgggttgcgcacaggctcgtacactccagattgccataggaagggtccgttttcttgtaacaggccgtcaagcgagctgcatcctgggcctccattcagccagatggtgatcttcgagaattagacgaaactctgcgacggattgaaatcacgtacctccttttccgcagctgggttggtagacgggaaaaaccagaagaacaagctcgattctccatgaggcttattcgacaaaagaccggcatagctttcgccgatgtcgaaaggaacttgtgggaagtgagttccgttcacttggaattctagaagaagtggttgtaagtgacagtctcagatcccaccaagacatatttgcacttactttccgtcttgttattcagatactgatgctcagtcaaaacagcgggaacctctcttttgcgcagaccgttagcaggctttctgaaagatgcagctctgccatgcggattttgtaccgccgtggccacggccaccaacgaagtaaaggctgccaaaatcaacattattcgatgatgctagagaaccagaattgaacccaagagcacggaaatctgcttttataaccccatcgaccctttttcaagacgctgctactcggagcgatttgcgttccgtgcggatattcacgcattaccaagctttgccaatagagatcgtggctagttgagacaagacccgctgtgaggcagacattggtcgctagccagcgggatctgcagcgactgcaacgtcgtcaggaacaaccggcatggcgattaattgcacttccttttactccgacggagtccgttatccagcgtatgatgcagatgcactcgtagctcggcccgctgtccataggaagatatcagtgcatgtgaatgccatgtttactgagctggtacggtcgcggtggggcgagataatagtatctagtatctaggtcttttagtgaaggcatttcataacgtcaaactagatgtcaatcctgctgcctgtactctatacccgcagggtctcaactcggatcaaatcaatttgataccacccgaaggttcatgacacatcctgagatctaccaaggtagataccatcaatgtatatttccatcgcatggataatgggttctattggatatctggtggattttaagatctaggtgagggggagtcagaatgagtactccgcactccgcatgtaatgacatcctaggcagaaaagatcaggcgacaagcaaaccttaggcattcaggcagcaatgtattcaggcaacaaggcatcgaacacattttaactatgacgtcaatttgtgcgttttctcgacagcccaccagatcggctgaagtatgacaccctacatcgagtagcacacatataagctgaaaatatttacctgtaactctgcagcgataacgctgatatgctagacctcggaatgtcgaatgtccctataacagacaagatgaaagctcaatctaatgggagtgcgatcataattgtttcttagtacaaagtgagcagagagaggtgattacctgtttaggaagcggatgtgtggggaagaatccatccaaggttcaaattaagctattaagctcgtgatgatgatatggtgaggtaactgtacattccgcagccctccgctctacgaattaggaaggaacccaagctgtcattattatcaatgtctggggatggaatgggggactcgtgccctgcatctctgtctgtgaggggcatacacccgaccggcacggtgtaacaggtgacattcctcgatcggcggggttgggtatcttttctatatagatctgccatcccagagctagatcgtatacatccagggcaggtggggtaattattcagggtccaggggtttgaagaagctgaaatgggcccttggcctttcatttgttgaattacatacatgattaatccgtatagcattatcaatatcgattaaacaaagttgagtctcccagataatataaccgtaaactcccgaagacaaatgattaacacatgaccttttcccgtatcccaaaattgaaacccaaccgaagcccgaaccccgaatcccaagcccattccgatattacccatcgtcaatccgtgatcatcaattagtcgtcaggtcgtgaattgtcgagacccgtttaatgagtattgcgtcttttcttgagtcgcagactgattttctttcgtagttcagagaacgggttcaccaaaggacgattgtagaagggatcgttcttgaagtcctcatcggtgaatttctggaacggagtcagtcatagtgatacagtaagataggaagatggacataccgtgccagggaggcgcataaagttaccagaaaagtcattcatcatgttcgagccctcttcgtaagagtactcctggccgttgcgatccatggttccaggaggatagaaagccacgccatccaatgggcggtgactgtttagggcatcggcaatcttgtggtgcggagtagcccggagggcctcggcattggattccttgacagcctccagcgggctggactgactgaagcggttgcgctcagggcgggtcgcgtcatacggaccctcgtggtgataggagaaattgctgacattgtccagcctgtcgatgatatcaggctgcacgatcatcgagtggcggttggacttggtggtgcggcgacgatggggagcagaggactcgcgtttgcgtctcggctccaccgggtaatgttcgggtgcgccggagtaccagatagaaggcgtcgagttcagtgactcagaacgcgaccgctgggagtagccagacggtgctggcgacatgaagcgggcatatgggttgttgctgcccatgcttgctcgcacgtttggtcgatcttgattaagttggttgaagtgatgactcgaggccatgggaatgcagtcaactgccatttcgaagttgttcgaagtgtttttatgagatgaagaggtatccaggatgaaaggcgcagggcgcaaatattacccggtgttataagtaagagtaagattactgaatttagaacaggtgaggctgaactgcaatgcaggatagcttgtatagtagctgaggatgtaatagaggaagagtgtaagagaagaagagtgaaatgtatgaagatgggtagatgtagaagggagaagagcgagcggcgcaagaagggcttatatcaaaggaagcagcggacgtgacgtgacgactcgctatacctatgctttaatgatcctcgtggctagacgcagtccaggagcctctgatggggcttagaacctcatttgaattttccgcgactgcatgtaccaattatcactgagaatagaccaccgggtggatcgagatgttaggtttactacttggccgccgattcccgggacgtcgacggagtatggcgttagtgatatcatggtatattgtcccactcaatagtttctactttcgctaaatcaattggagtggattacaattctcctattcgattcgaaaataaatcccatgattcaccatgcagaaagactaaatatatgcaaggcccatgttgcattccacatccgagacttccacgcagtcagtccacttcccgacccctatgacgatatccctggagtactacctccacatacattttcccttatttttcaacgtcatcctgccatctgaagaagaaaagtcaatttagatatcctaagtagtcgtcggatatcttatcccgaagtctccgatgactcgtccatggattaagctcatcactaggggaaatagcgtctaactggtctcacttggcatccgaactacccctggcctggtctagatctagactctatttcctccgtaccttcgttgggaaatttcttcagctatttagcttttcaccgctttttgctccttgctacgattcatgtgcatttcctcgttctacaacatacacgcatacaatctgaacggatgtcttgggatagctactcatgtgtagggacgacgcaactaattttgaaactgctagtgtgtttgatatttgtgtggtggggcgatatcgactccatttctataaatatccagctgaataatataactagagcggtgcacaaataattttcgcatgcataaaagattaggtgatatgtagctggtcttcatataaaggggctatataaggacacagagcagaggaaatgaatacaggccgatgtcgcattgccaccattccaaaggtggaattgaaataataatatcaagagtgttggtcggtgttagttacggttgtggctagtacatagaacacggacattgtagagttttatacttagaatgtcccttcgatctcatttcacagggaatactaaagcaatgttgatcctcagcatctttactaacaccggtagtgctatgtattccagccatatcgcatatcaccttctcaaaatcccccagaaaggggagggcctcgtttaacgaaagacagtcttattcaaggtgagtgcgttttcagaaaggtgacataatattctgactttggtaaagcatgtggcagactgcgtgcccttggagttggccagtctgtcctaattctaatcccacccgaggtcagtcatagcatgcgccgagaaaatgatcttgtgacctcgcttgacgtgattcgatgggcactcatgcaaacttgcgatactctgcaaagcttgaaacctctttgggcctcacaaggcttgcagtattataagaagagcagattgtggggtagtctcattgagggtagtacacctgcccaagatgtcgtttcatgcattcaggaacccgaagcgcaaactttatctcagctttatcatccatcggacgttcctagggcgtcaagtctaaatgagaatatagatccaagtgatctcgtcgtacgtggtatggttctagacggcaaggtaccgacggccaatcatttctagttttatatatggtatccgcttcatgtatcaatttaagactaaagctccttccttcaatcttactcagttactgtcttttgttgaagctctcgccacggttttgaataacatcgaatagaatttgattttgctttatctgaaaattgacttgggcatgtcatatcttatttaactacataatgtgaagcgattggctacaaaggaaatttgactctgtgcagttaaagctcttgtcttcccatgatataatacagttcgaaatcagttccatcgtttacacaaggagacttcgtctcacctacttctaaaacacgctatacccattactactactctatccttatgttaagtgttggtctgggcactagccgggaaacaaagtatgtgtcgggggggtactccgtacagtaatatgttttcgaatgctcttgatcaacaatttgtttgaaggatatacacgaaagccgcgcaaacataatcaggaataacaatcttccacttccgccgtggaattcaaggttcaaggcgacagaacctctgtgatttagtggtgaagctggtttcaatccgtcctgtgaaaggagtgagaaacaaaatgtcttcacaccacgttcagcgcatcttagaaccaaaaggacttacgtgataacctgaaaatttagggggtcggtgctaaaagaacgctggcacaagccccttgacatgtcccaaaagccgaattgcaagcaacaatagaggcaggtgcgctaatacccatagtagctccccaagtaaaacccgctgctgaatagcaagccatgacaaccgcggcacatcctgcttggcataccccgtacgcggcaggtccggcgagcaccgtagggctaaagagtaagagattaagaaattttcctcgtgagactctcatttgttcgggttcgaatcgggtttgaacggtgaaatagcgcctgaacctggggatgcaatacgaaaggaagcagatggattggtatatgtaccataccaagagaatgacatataatattttgctggcacaatggctattgaatgaagctcgattactggtgattggtctctatattgtaggcctatcataaaatttaacgtaccgctgtttccgagaaaaagataaattagttactcacaacgtagatacttatactgcatctgatacatcatatgcaaggagaattgaagactcacattcccttcttgcccgacacggactacctacttacgaataacacacccctgcccatatacgaggatttgataacatagaagtctcctgagatgatgatagtgagccgctttagtccaaaggcaatgttccaagtccactattggcgccttgatatttacagtgtattaaggtatcattaagttgctttcaagtggtagccgtttcgaacatggctgtgcagcggctcaaagctctcgctttcattttgtgaaacctgttcatgaagcgtacattggtgaatctccacgttactaaatccgtacgttgctgaatccgcacaaagatcttaggcaataattatgacataatgtgagaatagaaagaaagaatatatgacaaatgaaagagaagtgccaatatcaaaaactgaaatttatagatgaaattgaaaacggtgattggtcgcctacttgaaattgccccacatctgagaaatcagacctccatcaacacaacaactctcctgtcacatcggatgagatgtccctagtacagtattctgattcggaatccgactcagaatctagatcttctcttcgcccggccaaaaaaccttgccgcaacatcaatcaaggtccatcgctgccgcccctacctgcatcattccatagcctctatgcctcgagcacacgtgtgagtgtgcaagatgatcccagcctccatggcggccgaaaacgcataattcctcacgtagaaggaaactggccaacacatctttacctcgaatgtgagtactgagcgctggtgtaatgccacttgtacaaggagctaactttgatagggtacccggggaaagatgagctgtcgctccttgcagatgtcatctctcagtctggatatgtggcagaggaaaaggcacccgtagtgcacagtcttctccacagcgatctcggtgcccagttaccccttcatatcagcctgtctcggccagtgattcttcgcactgagcagcgtgccttgttcactgaggcgctagaaaaggctattcatgcctcgcatgttctatcgtatgtggccaacttacaattcttgatcatccgctaatactttgaatagatttcatgtccaaccagatactttatattggtcatccaattatgaaaagacacgttggtttctcgtcttgggcgtgcggagaccgagccatgatggtctgaaccgcctcctgaagatgtcaaacgagactctcgctcgcttcgggcagccgccactttatgcaacctcttcgactcaagagcaacagaccagtgcatccctccgtgataggagcagcagtcaggagcgcgaggatttctcagggtgcttccatatctcacttgcttggcgtctgtcagagcctagtccgaaggaatccgaactggtagccaagatagatttgcaaactttgcgggagatccaggttagattcgattgtgttaaagcaaagattgggaatattgtcagtagcataccattaggaaaagggataaaatgaggttctctttcagtaaattgggcgttgtctcttcaagaacatccaaattcgaaaattattacctatgcatcttgcttcagtgctccagatcctctcttaaatcatcgaaagtgagacaaagtagtcgctgcctcctatatttacatacaccttggtattggtaattacggtaatattacccacatgatcgcgtcttcccgcgacaactcccttctttctcatcaacaccaccatgcaggtcccaagtgtaactctggtaagcttctccatcatctgtgatcaaatgttttctaacctctctttcttctaggatgacctcaaagccttccaatttaagcacttccctgggcaacagctggctgtgtttccccaagaaaatgaccagaccacagacgacgatctcggatactatccagacggagtgaagcgtacgctcacagatgagcagattcggatcttcagacacagtgaagttcatgctcttctgcgagcgaggcagctccagaacgatgaggcgcaataccaagctcggatgcagtcatctatagatgatggatcaaagggtaaactagatactgtacctgaaaagcgacctctcgacacagaatctcagatgcaaggcggtgatcagaagcggctgcagtcccagaaggggtctaagcaacacaccccagaagacacgtcttctaagctggactacggggatgactctgatcaaacacaaatggcaaagccaccggtgtcacagacgccataccaaggtcgcaggattatctcctacaatgactgatctcctggttgagtatccggaagcccctatattcaatctaatggacaaacccgaatgcctacacttcccactgcactgacaagccggtaagttatccacattctattccactacacccttgcccgttcatgatgaatacatcgtatcatccttagccggaaagccataccatctgcggatgtgtgaggcattggcgaccttaatcttctctctgagggcttcttcatacctttcaatcacatgcacatatgtttatttgcgattctaacggcttatcagttatggtactttatgtgggtgcttttgacaaagagtttcacttttcgcatccgtccaaaggaccgccggccaaccatccagaacaatgctctcaacagtctcttcctatcattggatgttccgagcgatataactacaagacacattctgctggccctggggtttagatggtttgacacctgcttggtctcgacgatactatccaaaaaatgagcgactcgccatccttgtcagtcgatcaactcactggtacactgtacagctaacctccatctggaattcgggttgccgacggcgtaatcttgctatcctttgaatgcgtgaaatccttgaatatctgatcatctggcttcgggggctctctcttttggtctcgttgaagattgatttcagaaccgtcagtgtcgtcacaaaatgagcaagcttcatcatatgtgcttacagtgccttgaactagcagactgttagcagtgagcgtaacacgagccccgatcttcggcttatccgataatcaagaccgacttcaaaatgaaattttgactgagctaccatctttcatgcaaatcctacaacgtaatattcttagcagagcgtgctcgcagccatggcccatcccagggacaaaatatattgtcacaggcagcctctcatcactactcgcttctcatctccactcagacgaagttcgcaactgaaaggatctgaaaattccatgctggattcccacattcgataatcgaactgtttagagacaccgaggatcaaaaccaggtgccccgattgacccccagcagagaagacaaaccgagcctttcccttccccaaccttctaaggtgcctgcaacacatacaccctccatattttactccttcggcagtgccacctggctccgttccacctcgcaacaacagaatcaacaaagcgttcacagaatatgaaatacgaatcactatacccatagcagcaatcctctgcccgccaacaagcacagactaccacgtctgcgcaatcccaaccctgttccaagcttcagccgggtcggtatgctcccacacaagactgcggttatataacgcacattcgcgaacgcatgcttgactgaaataaacttgtaacctatgtctgcttgatcgcctgcgcgagttcagccttataactgctacagggtcagaaactaaaactatgtattattatattagttcacctctatctccaaacaccactatagtgtgtgtatgaaacaagtatccaaggcaaagccaactcaagcagcaactcgagatcgaaacaaggtatcgaaagtgtcaaaacagatgccccagatgcaaaaccagaacgccagaaaccccttcccagatacacttttatataaaccaggctaacccaacagaaaacgcatgcagctaagcattattcccacaagaaaagctctcactgctagggttatcatggagagctttgcccgagacccaaagaccaagaccgcacaacgcagcaccaacagaaataacaacgatattcaacaaagtgagggcaatcttcctcggcgacgagaaccacagacccttattcataaacaaccaaaagatcccactcaagccatacgtaaaccaactagcaaagagcgccgtgatcaagctgagcaggttactaaacacgggaatcgcagcggaaataatccacgccatggtccacagcgcaagcgcaataccgacccacgagcccgtagcgatccagtcacgcttgtgcatgcggtccgtaccctcgaaaacacgcaggtagacatacttgaacgcgacgtggccgttgatgacaccggcgatgatgatagtcggcagcgagatgccgtacgcgattttcgcgaccatcggcgaggcggagcccagtgctggcgaagtcacgtcgtcgccggcgtaccggtagattactaacgcggcggtgatgtacaggcccatgtcgatgccttgcaggagacagagggattttgtgaagtcttttgggttcctgagctcggccattaggccgaagaaggccgcgtggccgcagaaagcgaagacgatattgcagactgctgagaagccgtggtagaggtttgtgtcgacgactgcgacaactccctgtccgggtgctgtgatgccgacggcgatcatgacaattatgactgatgtcatgatgcttacgaatgctgggattgttaattgggttctcaatggggtgtatggaaacgtacaaacgatggatagccatgacatcttttccagagtgcgaggtaacgagcagatgaatgagatgaccatgccaacgatgccaaagacgatggagcaggtgccgtggtttgtgatggtgttcatggcaacggtgaaggtcaacaggtggctggccatgataaagatgaagaacacgatctgtgcagcgccgaggaattcccgtccccatttccctgctataacctcaccggcgtctgcaaacgtgcagatgtgtggatatctccatttcatctgaccgatcacatagccggtgtatgtggccattaaacctaggaagaccaagacgaggatcgctctggatatgattagcttcaattcctgcacttgaggcagaaggtatgcttacggaagtagtcccagagctgccacagcggcgggcagtgagagcacacccagtgataccgtttcagcaaccatcactaatagaatgttagattagggttggtttgatatagcatattatcacatacgcagaccacattgcctaacaagatatacgttaataacagagctaccacttcgagctatgaaacataccaccacctgagtactttgtacttgacctccgcgaactcctcgtcgccaaaggcatcttgtctgactttcgggacctcaaacttctccggatcagacatcaagtccgcgggatttatatagggactcttctcattggaatcgaaatccaatgcagaatgcgaggggctcatagcgcagatatcaaaactagcgagtataccagtatacccgggaagtagatatcacgtcaggaaccgaacaaaaagcgacgaacaaaaccgaatcgcttgatacaccaaatccaaagagagagtaagatcttaacgaaagggaaatggtattaaaaactcgaattcacaggaaaagcacccgccaagtcagtaaattgaacaataaagaatccgccacacgaaactgatgtggatcgccgacctgcggaccgcgacgacgaatcacctcgtcgagacgtaatggaaaagccgaaaaggacttggtctgctggattcgagtgagaaattacactggtgaaaattggaggaaagaaaacttcgctccgatgccggcctcctgtgcgaggttggacctggctgttctacaggagttcaggtctgcgagggtgaaaatttctataggaggtctaaattagaggcgactacttttggccctgcagatttgggaactccatctgataagcttatttatgtctgtctacggggtagcctatagggatgaacttgcacgatgtcgtgctcacgccttttgccttaaattgcacgacgcgttcggatatagatcgggtcggagttggtcgctagttccggtttcttttgatgaaccacacgatcttataaggatatatgggtcaactattcttgttttcattgaatacagctatgctttcatgggtttctcatataagctcgcatctgtcttcttcatcaggttcaactctgtcgacacatcctattaacagaaagttgatctcaacgcatatcccaaggccgctttgaaattccgatgcgagggctttgtatgagcccgacgtaacggcgacatcacacaagagaacccctagcatgtaatactggacgtagatagataaaaggtaggccgaccgcccaggatgccttcatggttgcaatctaccatgtagtcaattttgcccatgccgtttcagttcaaccagtagtgcttctcttcaggtggcatatatagcagcctcacaagaccccagcagatgaataaagccactttcaacggctttattttctcttcgagcttcggacggctccgtctgaaaagagcctccacagggagacgcttgcgtgttctttatcgatgtcgttaattgctacctccaaggcacaggaaacagcaaatagttgtaggtgctcaccctgtgggatgaaggtagaccgactcgccagctgtggggtgttttcgcttgcgactgggcttgcgactgggcttgcttttgacctggacatggtgctgggagagtcgtctttagtcaaactcctgtgcgcaggattgaataggacttgtcatgaagattctccggtggttgaatatcatattcacctcattagatttcctagttaaaagtaaggggaaggatgattagctgtgattcggaagttatgacttcgctagattcaccattgttgtctgctgagatatctgatgtagaatctggtttagatttttagattcgatcatataggctctgcgattcaccttggttgctagcgcaatgctcgtattcactctctgagtctggcgagatgcgcacatcacagcgtggtatagtgaggaagaagcgagatataagaactgtgatatataaggaagatagatataggagagcagatatagggaagacagatataaggaaagttaagagatagacgatccagggagaaggcatctggctatataccgagaagttgtttgtcaaagacaacaaacacatgtggcatttgttcagggaaggtgcaatggagagtgtcgcgctttaggaaggcacatgggttcggggtataaaaggagccctccccccatttctcctcttctctttttcttctcctctccccatccctttgaccaccatctcaccgtagccccccgagacagcgcaggcagagggtctcgtagcacatgctgcttcacctaccacagggaccatgacattaccatatgcatgaggtccttgtaggtctgcatcaaacaacaaactggtctttctcgtggacgttcctgaagtcgtggctctcattgccatttgacgagtcctacggaatacatgaggggtgtaaatcttcgtagccggttctctttgtcaactggctatgtatcaatatcaggaaagcaactgacttcttgttcttctttcattcaatcttactcacattcatttgcacaagccacttatacggcaatcattcaagtcccgctatggcacctgacatctcgaactcctgcctcgctgagcttgctgtccagaatttcctagaaagaagctacccaacacactgaagagtcaggatcacctcctgcctgagatctcaaagacggctacaccaagtcatgtctcctcatcggactacgcaatcaattcttcatctccttctatgctgagcatggacgaatgttcatcaaacccatttacacacactggtaacaccgattccagataacatatccatccaattgtcaagattgaccatgaattaactaatgcacctgtacataaatgaaatatggaccttatgtagttagccaaacctatccaggaatgaatcccatccatccatccaccaccaacgccggcggactttccagtccggaaatgacaagcaaaacgaaaaacaccatgctagtaaaaatgctatacaacaaaaaatgtacaaaaagaaaaccatatgtttcatgcaccatgtcaccccaaactccgccgtttaagtctccgcctcttccgctgcgactgctgaatagaatcctcgttcaggatatccggcggcagctcgaagtcctgttcgcccaggtcagggaccggatatccgaatgcgagggttgagcgggatccgccgcggcgtgtgccttttgttgcggcgatggctgcttcgcgcacatgtcgttggcggaagaaggatgtgaatgggctgtcttgtggagctgggttccagaagtgggagagggagggttgttggagccgtatggatttttgggttgagataggagctgggtgaggtttagtgggtgttgggttgggctttttgcgtttggggctggggtttggttcggagttgttggtgttggtgttggtgctgggaggaggtttggtgatagacttgcgagtagcgggcgctgtcttgcgccgtttagctgcgctcgctgagcgagcttcttggtgaagctgacgcgcagccaaagcgtcgacatcgcttgggtctgggtctggctctgcgtctgcgtccggcgtgccggtccccggggccggtgagctgtccacgggacgagatcgtttgcgcgagtgctgttgcgaggtattgggtgttgcctcggtgcctggcaccgggagtgccttttccctttccagtttgcgacggcgctcttcgtctttccatgcttggaacttgttgaccagagtgactagctcctggattaggatatcgcgcttcggctcgtagagcttcttgtcgctttcgtggactcccgtcaggcccatcatgcgtagccagtcctggccgcgtagctcgtccaggagacgctctaggacttgctgttcatgttgggcgcggttgcgctcgatgttgcggagttgtttctcttgtcgttcgaacttgcggtgtgcgcggaaataggtctcttcgctcagcgggtcgactgcgggtgtgcctgatgcgggtttgggatgtttggggcggatcttttcacagtcgtagagcttgagtagcgggttgccaaagggtgtaggctccgggttagagcagaatggtagtggtcgcgggaggtcgtccacgagagtgatagttgttttggcagcaaggaattctatagtaaccaatatcagccatgcgctcgatccattcaggtcgagcaacttaccaggttcgggcacatccaagctgataatctgttcgtagttgtggaaatactgcgcaagctcgctcttgcaccgtgacccggtattggtcgaacgcaacgaccgtctctccgaccgtgtatccgatgcaggctcgccgtcgctcctgtcccgcgtcgggggcacccccacagcaccctctgccttgatcgcgctctcgtcgacgtcatccagcgatcgattgtcattccgatgagtcgtgcgagcaggcgaaaccgttggcttgctattcgcgtccccaatcgcaggggtcagggtgcgctgcttcgcgaccgacggggctggcgagatcgtgtccaatgggtctggcgactcgtgcacgccgcgcaaaaaatcggcgccggaggaggttccctgatcgcggcgggcgcgtggggtcctgtaaatgccattgccattgccattcccatttgcacatgccggggtcgccaattgcccggaggcgaccgtgtccaccgacagagaggagttgcgacgagtccgattggaggtgcgcgggcgcgagggtttcaaggggttggaacggggtcttgcgatgggatctttgatgtcgagacagtcgggggagctcttacggtcggagccatttgggatgcgcgatttcttcagaccgtcggcaggatcgggggcccgtcgcacagagcggagggaagaccgcgacaggagggccattttggatgatgatcagttcatttgcattcagggggagtcccccgagggtttacagggatttagggatgaaatatgggcatgcgagaagttcttggcgaatgccgatggaggttgtcaaggtggtttatatggacttcttggaggcgtcaacgatatattgattctgattctcttcagagatagacaatgcattgtattcattctattgttctattcagaattaattaattcagctgttgagatatatagaatggcgcttccaatgggcacctacataggtaacactccattcttgctacaggtattatcctgagataggttctcattgttaattatctctatgttcaatgcaaaatagtcaactattcaactattcaactctcgctatcccaactatctcggaaaagggcaaacccccacgggccctcagtgtgggggacggcaattcaaccattgccaggtcggaattgtaatatttctatacatgaggggtgagaggggatattgggatattggatataagtctagtaatagacagtagcactgggcagtagacacttacaggagtagattcaggatatcagatagacaacctagatatccccagtttacccctaagaggagaggggatatactctcctatacactccaacgcatcatcgacggaaatcaaccccgcaggcgtggggggaaatgtccgaatgaaaccaaaagcagacgtgggggataagactatccagctaaatagctgtaggttcgccgatattgatccccatccctaagtgacatttggtatgcagcgaatgagtccatgaaacctacacgtcctgacagaccaatagacgacctcttctccaaaatgaccgccaccaagctaaatgccctcccccacggtgtctacgtccccaccgtagcattcttcaagcccgacgaagaagtcgacctcgcaacggtcgagaagcacgccgtctatctcgcccgcagcggggtaaccggcctagtaacccaaggcagcaatggcgaagccatccatctagaccgtgaagagcgcaaggccatcacagccgccactcgcggcgccctcaacgcagccggctacagcagcatgccagtgatcgccggcgccggcgccgcctcaacccgcgaaaccatccgcttatgccaggactccggtgcagcaggcgccgacgcggtcctggtcctcccacccagctactacaagacactcgtgagcaccgagtccatgcacgcgcacttccgcgccgtggccgatgcctcgccggtccctgtgctcatctacaacttccccgccgtgcagtccggcctcgatctcagctccgacgatatcctgacgctcgcagaacaccccaacatcatcgggtgcaagttcacgtgcggcaacacgggcaagctggctcgtgttgcggcggccaagcctgatttcttgacttttggtggctcggccgatttcacgctgcagacgctgattgccggtggggcggggattattggtggcattgctaatctgattcctcgctcgtgtgtgcgtgtgatggagttgtattgtgctgggaaggttcaggaggcgcagaaggtgcaggcggttgttgcgcgtgccgactggactgctatccaagggggctttatcgcggttaagactggtctgcaatgttaccgtgggtatggtggtcttcctcgacgaccttgtgtcgtgcctgatgcgaaggctgtggcggccattcaggaggagttccgggaagccatggagttggagaagtcgttggagacagtatagatgaattaaatcatgataccagatgctatacggatattctgttctttccagttagttcaagataatcgtaaataaacacagtgcgactgtatcatccatagctcctccccctcttttaatatcagatgaagttgcatgtgaaggttgcactgtctcctcttctttgcttctaatcatctccgtttgatgtaacaggagataactgtttgtttttccgatctcgatctccaggttgcatcaagaatgccaatgtgagatcggcaatgcagcacataaataggtctggctacctcatagccacggtctttctgtttatcatcatcactcgactcctcatcatgaagttcgcctctgtcctgactgtgctcggggccttgtcggtttccgccgtccaggtgaatccacttcccgccccccgtaacatcacctggggttcctccggtccaatccaagtcaaccacttgaatttgaacgcccatcactcctctgtggtctctcaagcttgggagcgagcatgggagactatcaccaccctgcaatgggtccccgccgctgtcgaggccccgattccctcctacccagccttcccttcgacccctgtctccaaggccaaacgcgcgccctccgcggtccacaacgtcaatgtccatgtggtggacagcgatgccgatctccaacacggcgtggatgaatcctatacactggtggtggccaagggcggcatccagatcaatgcgcagacggtatggggtgtgttgcacgcgttcaccaccctgcagcaaattgtcatctcagatggcaagggcggcttgatcattgaacagccggtcgagatcaaggatgccccgctgtacccctaccgtggcatcatggtagacaccggtcgcaacttcatcaccgttcgcaagatcttcgagcagatcgacggtatggccctgtccaagcttaatgtccttcactggcacttggacgatgcgcagtcatggcccatgcagatgagctcctaccccgagatgaccaaagatgcctactcgactcgcgaaatctacaccgagaaagacatccgccgcgtgattgcctacgcccgcgcccgaggtgtccgtgtcatccccgaggtcgacatgcccggccactctgcttcaggctggcagcaggtcgacccggagatcgtggcgtgtgccaacagctggtggtcgaatgatgtgtgggcggagcacacggcggtcgagccgaaccctggccagctcgatatcatctatcccaagacctacgaagtggtcaagaatgtgtaccacgaattgtcgcgtatcttcgacgacaacttcttccacgttggtgctgatgagatccagcctaactgctacaacttcagcactcacatcaccaagtggtttgccgaggatccttcgcgcacctacagggaccttacccagtactgggtcgaccactccatgcctatcttccgtagtgtcggtgagcaccgtcgcctcatgatgtgggaggacattttcctcgcgaccgagagcgcgcacaacgtgtccaaagacatcgtcatgcagacttggaacaacggcattgacaatatcaagaagctcacctcggccggctacgacgtggtcgtctcgtcctccgatttcctctacctcgactgcggccacggcggcgctatcaccaacgacccccgctacaacgagcagagcaacactgacggcggcgtgaccttcaactacggcggcgccggtggctcctggtgcgccccctataagacctggcagcgtatctacgactacgatttcctcacgaacctcactgccaccgaagcgaagcacgttatcggtgccgaggctcctttgtggtcggagcaaatcgacgatgtgaccatctccagcgggttctggcctcgcgccgctgctcttggtgagctcgtctggtctggtaatcgtgacgcagcgggcaaaaagcgcaccaccaaccttacccagcgtctgctgaacttccgtgaatacctggttgccaacggtgtgatggctactgctcttgtgccgaagtattgtctgcagcaccctcatgcttgcgacttttataagaaccagactataatctcttaattgctttgagttggacttagcgaacttatactgtctggtctgtatatacttggtcttctatacccaataccattggaattcttcatacagtctactatttgatatgtagttattgtaacaaccaacccacaacaccaacagctcctatacctacctcctacccaatcccaaccccaatcaggcaccaaagcctcctccagcccaaatcaaattctacccccaaccccaattctcctccatattcaccttaacccaaacaaagccaacctaaaacaaaacaaccaaaacatcacaaggccatccaccgatcagaccctcacagaaccccacagaccctctccccttcccaacccacccaactaacctccacaccaaaccaagtcaaaaccgccgtacaacctccctcttggaacttggaactcacccttcgcccccgtcccggactagatggcctcgggaggggcttgctggtgcagtatgcgtgtaggatggagtactctgtaggtataagttaggtgcaagcatgttgcatgcagtcggatatcgcatgatatcattagcattgctatgtattgatcattctacatccacatattgtatatagtatgaatctacataaatgtacacataggtacaagttcgacgtcaatgttatatacatctgtattcatacatctttccatgtatacgatccataccgcaccggaaaaaaccatccatccaagcataccataccatccatgctcaatccaaactcgaaacccagtctacggattcgattcagactgggctgggctgcgcgggggttgctcacgtgtgcacgtatatgcagatgcagaaaggaacatatgttgcacggggatttagctgggaatgacaaattgacggattggggagatataggcgagcggttggatggttattgcttgctggttggggttcgtcatacacgtggaatttggggttatttgtcatttctgggacgggggtaggaggtttgggatggatgaatggtaatgatgctgataccttcctatttgggaatgggatttgcattcttcttaccctgtatgtatctatgtatgacccggagatattcggtacatgtacatccctggcctctacgtatgtgtttatataagtatgtaccgatgcttccatttccggttcgctgtgcccgagtagatcgggaactgatctcgcatattctagttacgtgacgttgcgaaataagagtaactggttggtaagtataactcctgcttggtttggtttacggcttacgtcttacctggcgtggattgaggtgagatatatttctgtatcacagtcgtgtttcaacgtggatcggggtcttttcttcttatattcccttggcttatgtttcatgcgattgtgcggcttcgaataatgcatgtctagcatatcatatggcgttaatgactggggcgttgatggggctaggtttgaggttactcttgcaacatatatcaaaccgaatggtcgaaaatatacatcgacgtaacaaaaaacaggaattcattcgttggccatcaaatttctaaatttctaatacgtcttaatcttactctgactcctatctcatctcacctcgttaccgtttcacagcataaccccaagaaccatagtctgatcgcagcgtggaccacgaccaaatagaaggtctcgtgttgagcgataaacctggaactgtctttctgacagggctgcggagaatttgcggcattttgcatcgacagggtcatccctggtctgctggatgtgtttcattatatcccggtcggttctgacgtgcgtatgtatgtattactggtaaggcttgcaggggctgtgtcgacatttgcatggaagtccttctagaaatcgactttgttgttggacgtacatgtgttcggcatgtctatatgagtttcggcgaatgatatctcgcgattccgaatctggatatgtcaggcatgtttgagatccaaattggaagtctgtgccgaagagaatggagactatccatattgcgtactaatgccgttaatcctcaatatccgacttaggatgagttcaagaatatgggcaatccctgtaggttgcgaggtatacatcgcataaaaccacataagcagcggaccgagctcagaccgatgatcccccacacatcccacgctttacactccagtatgtactccgtagatgtgcctgcgatgtacgccacatgtcaatcccagggttatcataggagtacctgaccgcgtcaatatatctatccaatctctcgggcaaagtaaagcaccccgcagcacgccatcacccgatacatctacatctgccgagctatctgatcaccgaactatagaacctaatcccaaccgaaaacctgatcgacagcacacgatgcaggatatacacccgggtagtaggtccgaccttaccagatcgaccacttaggagttcgtcctaccacacccactccctcgcgtgtcccatcccgcgcgggctctgatcaatggaacccgggttcctatctatcgcgccttgtttttgtaattctttttttggccgggcatgcagacgacccacacgcggggatgcgaataggaaaagactgattccttttcctgtcagttacgtcggggcgcgtgacttccggatcggataaattaattgtggatgcgggtcgcatccatatgccgtgttacccagacgtcattgtagcaccgcctcactgagtggagttggggatctttgcgtcattttcggggagaggaaacacgctcccccataggctgaggagtgtggctggtgtgtggatggtgagtggctggtgatatggggtgggtgtggcttgcgtttcgcttctttcggcttgtttttgtttttcttttctgtggcgcagttgcgagtcccttggtacggtaaatacgtgtaaacagaggtaaagccacaataggcaaaagaaaaatactgtgtagtggagatccgatccacatagttgtcgctagtgaattttcaatctaaatcgcagttcgcttcgctttttgctcgggatcggcacgccaagtcagatccaaggtgacagagcaaaatgggtggaggtgtgatatcaatatcgtcaatcgggatttggcacggaattgatctctagttcccgagatcccgtgcaggtcgatcatcagtgtaggaatatgtatcaggatgatttcatgatgcatgcgccgaccgtatacagcacgagcctctttcctattcggtcgtgtcaaatttgacaggacttgattagcgtactgtggcttgactagtcctttcgcgcctcgctttcatctacaatatattgtctatcacccgcgatgcccgggcggaagagtggctccaggtacagaaatgaacagcgcatgtccgtcatgcaggaagatcaccgcgggaccccccagtaattgaagacactatcaatctatctcgacttgctacacttcccaaatgcatctgcctcggctacagtggcacagtgtaactccttgctcgagtttatcacggggctgagtccacatttcccgctttggtcggctgtgacacacccagatatcagatcagatgatgcgatccagctccaatctaaagaaccaccccatattgagtccgtgggcagatcatccagtccatggaaattcaaaccgaggggcgtggcagatatcgtatgaccgagaagtgattggactaccgcgtacgatgcacatacaacgcaactgcaagataacaaagggccagattatttgatctacgctatcaaatactggaaactagttcccaggccctgaatcagggccggtgagtagctgactctagattctactgggattaatagcttcccctctctgaaagttaatcttgcattgctcgtgtcggagtggcaaacggggtgattgggtgagttttacccctctcgggtgaacaccccagaaacagaatccatgaacacgtagatcagagcccgggtgaactactgatctggcatttggagacgagcaatgaatcaggataaggtatgtaggacgaatgacttcaatgtaagagcaagagcaagagctagagccgcacttttccgtatggaactgataaatcaagaattcacgcggaactcacgcgagcagttactgagattaaggacacccctgtcctactcgcatttaaccttatttagcaatatgccaagcatcctaattagggacatatacctagtacactctaggtaaactaccgacggtacctaggtaagtgtatttgcatttaccctttacatacttcctaaatgaatgatatagtcccacatggactgatctgtcccaaccacatggaaccgtggagaggatcggaccgcgttcatggtactgcagcttacctttccttgcctatgaatgaaccaatagaatactttcgctatggtgtcccacggtggtaagacaggcaaggatatccccttcaagaaataagatatgtgcaaactgtatcacagagtagtttcattcttatgcaggggctcgcttatgaaccttgtcgccctattttgcaggtgcataggtagattatcacataggaaaagagatcaggaccagttaccgtttacatgcacgaggttggcataatgatatatcatcttttcactcccaatgtcttgatagagatgatctactgacaccaacatgtatccgtcccaatggggagcgtggacacgctccacccaccctccgatccacgtccacctgcattacataggcgagtccagtcagatcgcaggaagtagctgccgggcagttcactcgtgcatcctagtgcctatacgaggcttggaggcttggggcggccccgctttcctatttgacgagatgaccggacaacgcacaacgcacaacgcaggatagtgtcaggggaaatggggctcctcgtgcgctggcctccactctgatatctccacttagcttaaggacaagctggggtgatgttggtgctagtatgatagtgattccggcgcggggaggttagttttgatgaggctgtatttcaggcacgggaagacgagcatgtggatatgacagatctgaagcagtcgttgggtcgaaggattctgaaggagcgtgtataggtctagatcttgggatcgtcggcgtcgctgttggaagctgcatttactattacattgttatgcttggaagtactggatctaggcccgacgaaggatcacaggagtagattgaatttgaaaattgggaaatcaatggcattgttgtgtattgttttgatcgggtagggtacggtcgaggctattctgttgtgtaacttagaagctttctgctattatagaagccttattatgtagacagggcttaccctgtatataataagtgtgctaatttcgtcgcgcgcggttgagagacacaaatatcgcttcttgaaacggctaagtcccggccgaatgagctatccgactcgattgatattatgttaaagttggtaattggaattggaaatgtcaagcgtgcattggacggtcggtaggaattgctgtctttggccgtataacagcgctaaatgacagatggggctggttgtacgggcgtcggaagaagatacagaaataagctacgaagcgcttattataaccccaaaggagtcagtaatatttggggtctgaaatatccacaatatagcattataatcaattgaggaaggaggataggaataagcgtggatgtggtatggcaagttcagagttcgtacgactcggcggactaaaggaaccatgaaccatgaaccatgtcgaccagtttcccaactctagagatagatgtaaccatctggatctttagtctagtctagtccttatccctacaccagactgggttgtcgatgcatacaatattgtcgacgttgatcttctccccctccggctgtttcacttctgtttttagaaacaccacgcgcttgacagggattaaacgttcccccaccccatgtgctcggtcctcctatagggtttagggccatacaactccgaatagcataagaggctcaatgttgggatcggcggttgttttcagcgtacagcgtaaaatatagatgaggattttcggtttttgtttttactacgtgtgggatgtctcgcatcgaagttggtttattcgcggactttattttatttcggtaataccgcaaaactggaggaatacgaaggtctggggatggaatttgccactctggagaccgtcgctggccccagggtgatccgagcacgaatgacatcaaagtaaatattgtcgttcgaagtataatataacgttatagacgaaagttgaaagttccatggttctatctgagtcaaccgtggacagacagtactcggactagattgtcttgttttgatatttccaagttggcaccgatttcccgtattgggtatctctttccgacattttgggaggaccgcgttaaggctaggctaactaagagcctcttgatcgtcgtatttttaatctggatatgcaagtccataggaagtctcggggtcgccggatcggcctcccttcggcatataaattatctcagtaactagttggggccaataatataccattaataatctctacgcagtcggatctctggcccgacgccgggatgacagatgagtggagaatcattctatcctcaaacgatagaagagcctagaatgtcagattcaaatgcttgagttacgtttcagcgtttcagtgaaatggaaatatccaccatgttgggggccaaaagtgtgagagcgagagcgagttcagggccattgggtccagtagatacctcgatctcacgcatgaaggagcgataatctcagtcaatgggtacttcttggtactgactggctaatgcgcctgaggacgttttaggtatatgtttgacatggacgttgaaatcagtctaacagttatagttacatactatgcatatgatatatctttgaataacaatcaaagaattatggctaatagtaagcgtctgcacctaacccattgcccgggtatgtacatgtgtcaagtgcaaggcaaatgcacgtatgttatgttgtatgccgaccgcagtgtaggctaagcaaggcaaagaatcggtcaaatcaacacaggccagatatgacttcattactccagtctcgcatcaaaatttagactgtgcatatgactaagggtggataggatagccccattaaaaaaggggatgttaccaccgggatcgccgataaatacaacatacgaactccccgccagcgctgtaatttatccagctgcgcctcaattcagggatgtggatcgactgccccatgttgtttggctacggacgaatcgcatgaacgccttcgctcgcttatgattgggactcactcacgccggtctgttgtggcttgggcatatgtggcgctagttggctttagtgcatcggcccctaacacggacactccgagtgacagctcgcactgttatcccttgggctagctagggctatggcgtaattagtgtagatgatctggatctagatgatctaagatgctgtcatcggaaatgcggagagtagggccgagattgggttccttcgtcttgtatatcaccatggtggtgttcggtatataataaacccagggatcttgatggattgagggattggatcgtacagattaacctgcatccgaatctcggactgaaaaatgggaaatgtcactatatcaccgtgcatccgagaaaatattaattgaggttctttccattttgggtagacccaccattgggttcttcggatatgcaacctggtgatcagatcatcaaggggtgtacagatcatctatacatataaacccatgccgtcgacagattgacactacagtactcaaggaggtgacacctagttagttacttcctccaggttaatgacgtaaaaggcaaccaggggaccttggaagcaggccacatcgcgatcaccaaagaatgcggctcttgaacggcagcctcggaaatcagaggacaacacacactgtaggatcgcctttcgtgattaccgagaaggactagtgggcgggactgatacgaactcacccgacgctaaggaagcccaccgagccctcggagagcctttcagatgtctgattggagagaatttagcaagccctcattttcctgttcgttgggttggcacatatggaccaatcacccttccgggcacgcggtcggcctgccaagttatggaggagatggggccccgtcacggatcgaccgaacttatgggatccgattgtatttgtacaagtatgtgtacaacataactatgtgttcttctaacatgccttatattccccttccttctcatagaaaaggagaaggcaccagatctgagtctattgcattgtctgcttatcttagtttatctgaaaagaattccgtccgctctttctctgggtcagattttggtgcaaaagagtggaacgggtacggagtctgactctgactgccgagatacgaagtatggagtagaggatagacagatgtagatccactgatccattgcatggaagctaggtcaaaagtagtctaggcctatatacaatgtcgaagagaggttaaaaatgtatttttggggaaaaggggccatggcgccaagcctcggggcagctctactttgcagaacggagatgccgatgacgacagggtaaacgattaatcatataggtaacatttgagtatataggtggctcctagaacccgaggtggctcttggtgcaacggtcaactttctgacaggagcttctcctatcgtcaaaagtataatttgaagaggactactccgtcgcagctgtgctcgatgcgccatcgatcggtttccacgaacccgatggacgatcgcctcggtgaaagtacttttgaaaaactaatattccggagataattatggagataattccgggataaatactccgtattcggggatatattcggggatcatatgtaccccgtagggcagagtgaggcaagagtggataaagccagacgagctgtcagaacccagaaggtactaaccatgcggagacagtgggttatattgactgttgacagcatagacatgcctgacgaaggctgagcttatggcgtagatatatgggtaccgtgcagctgtacggagtagaaaatagagtgtacacaagcagaaggtaagagcacatgactagttaattaacagcgattactcatccgattaagcctaataacccgaaggaggggccctaagtttccctgtctgttcacagccacgttcaaccggttcgtgccagagatacagtatgtaatggtatgtaatggttactggattattatttatttatttgatatttgctttttactatgtgaagtgttttttatgattttcatttcatttcattttttatttcaattccattttccttttattttcactttttaaataaaatataattatagacaagactataactaactactgtagggcgggcccatcgtcaccatttaacaatctcctcgacatctataatatcctcttctcccctccggtacgaatttaaatcattgactcaatccagcgcatccctcgaccacttccgggtacgcttgtttaaccttcttcgcctcctttgtcgatcttgcctcgctacccgcgtctgtggagttgcaacttgctgtgacctccctgccttgcgatatcataatcgacctccttacctccgtgcataagaatccgattctctctgtcaattgcgcacgttgcctcttcgtggctggcgtgtttggttagccgagcgggccgcgatcttacccaggaaccttatcaccggtatgtccatgcgtcgcaacggaaaatcttgagacagcatgtactgaccagctggctatgttaggatcgccctcgcgcattgcattctcaatcaaggagatgaccacttttgaatccaaccctgatttcaccctctttcccttccacgcccgatccaagatgatggctgtcgaagctgcccggccgaaacagctatacttcgatcccatgatggatccttccatgttctcctttcccctggagagtctccccaactacgcacacggccacggccacgatatgcccagtgcttccaattcctactacgatacccaccctctgctggagtctgcagatctgcacaatcctacatatttctcttctgtaccagccacaccgccttcggtctccgcgtctcactccgcagagccatatatttccaccgggtctgcctccgggcagtccattgcgagcgcatcttcgtcggcgatgggatcgccatactcgggaacggcgcaggcatttcaggagaattgggtgaatacgaaccacggattgggtctaccagccgcagtcatggacgaccttttctcgcaggaatacatgggaagtatgttggacatggatatgccctatcaagagaaattcccggacccttttgtcggtacgtgttgatatcaatcgcaaaccgtctggtgtactaacaatgcattcagatccctcattgatacaaccgacgcaacaagggcctggaattaccccgactatctcataccccgaccaacccacctcttcctactcaaacgtgcaaccgaactacatctcccactctcccgcaccttcacctctctcatataatgatctcgcagagcaccactcacccgcaatgcagcacaatgggctatctcccctcatggtcccgcacaggtcgcattcacgaccgctctctatctatgaccgacggtcgtctatttcctcgattcattcccgacgctcgcaacacagcccggcgctgagcagcatcgaaccggacgaagaaattaaggagaaagggcgctgcccacaccccgactgtggtcgcgtcttcaaagatctgaaagcccatatgttgacgcaccagtcagagcgacccgagaagtgcccgattatgaactgcgagtaccacatcaagggtttcgcgcgcaagtacgacaaaaaccgccacaccctgacccactacaaaggaacaatggtatgcggcttctgcccgggatccggctcccccgcggagaagagcttcaaccgcgcggacgtcttcaagcgccacctgacctccgtccacggcgtggaacagaccccgccgaactgccggaagcgcagccccggactaaagaagggcaccaactatagccccgacgcgacaggaaaatgttcaacctgctcagcgaccttcagcaacgcgcaggacttctacgagcatctggacgactgtgtcctccgcgtcgtacaacaagaagagccctccgaggcgatcaaccagcagcgcctcgcagaggtcgcgtcagacgaggaggtgaagaagaccatggagaagcaccaactcctcgacgtgcccggcccggtcgagcaattcgacgattacgaagaccaagaagacgacgatacccaagatcccgccagctggcgcggcctcaagacgaaacccagatcctcgaagagcaacatcccggcctcgcgcccgattatcggctccggaaatgcagtctccaagaatgtctccaagcccgcccgcgctgtcgtaacccgccgtcgcaacaaccgcggcaactacccccagtcctggggctgtcccagcagcaccatgaagacgaagaagcgcgtgctgtgtgtttttgatggccagcgccgtctgtggaaagacgagatgatgctcaataacgagttcgaggtccgtctgagactgctcggcggtgcgggcgatggcaccaaccgggatgcctacgttaccgatctggacgtcgagacgatgaagcgcgctgagggtgtgctcagtgccacagaggaggagcgtggtccttggttgaacggtccttcgccttacattatgggccagccggcgatgctattgccggaactgtctcatgatgacgagctttcgctcaatgaattaatggcttaaacgactttcttttgtcttttctcctactccttactctctaccttttgagacctttcgtgtatttctttcatgtctcatgtttccgtacagcagtggcgtcttgacgagcgatttgtctgattacggattatggatgataccttgggactgacacttaatgactttcgttctttgttttctgtttctgtttctgtccaggctggtctcgtggcttcatgcctgatcccgctggcgggattcgtaccaagacactattaattggggactaggaatgagtgtctgaattgaaaacaaaaaacattccatcttcaaatgtcttgaattctcagcaagtgtaggtctgaagtagaaaagatataagaatgccatagacccccacctaccgatcttcacccccatgttctgccatcttccccggtgtttaccccatccaacctccacgatgcaattgggactctcagaacatctgtccactctggtcgcaagacgttttacagctgcccgagatagcggccatctcgtcttctcctcaacccatctctccatcatcaatgccgcaggaatatcagtgagtgacgctaagacccgaccacgacggttctaacctgcatccagtaccaactccgctactgcccggccctcgcaaagaaaccctccaatctcaaggacaatggcccgaaaacgccaaagttcgatccctttcagaacccatgtccggagcttctgatcgcccagttcccgcccgagaaccccgcctacaacctcatcatcaacaaattccccgtcatcccgaaccacttcctcctcgtgacaaaagactggcaggcgcagacggacatcctcgacaaggctgacctagaggctacatacgaggttctgaaagcctggaacaccgacagcgatggctccaactccaacagctcgaagagcctcttcgccttcttcaactccggcgacgacagcggcgcaagccaagcccaccgccacctccaattcctccccgtcgaagcaatgcgccagccaggctcggactcctggtccccactgatcgacctcctcacgcaacaaaccccccaaccaacctccccctcccaaacaccaacacccaacttccagcacctccccggcctccccatcgcgcacttcgccctcccaatcccaccaaacccctccgccgaaatcctgcacgacatatacataaccctctaccgggccgccgcggcagcgacgcgcggacgaacaccgagccaggacaccgagtcgctgcccacacacggacgagcgtgcataagctacaacctggccatgacgcgctcgacgatgatgatctgtccgcgcagacaggagacggcgactgtccccgtcgacgctgacagtgtcgctgcgcgcgagatcgcggaccacggcgtgctctcgctgaatggcactatcctggctgcgacgctgatggttaaggccgagggcgagtgggatgctttgcgagagaatccggagcatctgacgcaggtgcttgctacgattgggtatccgcagacggattctcggggttcgtcgctttgagggtttgctgggagtatatagctacgatgggtagactacttgcatgctagaattgaatacccaatggaattgctgatttatagcttgaattgatgcttgtgtttctcctatctatgagagattgaaataattatgtcatgattgcttaatagaagatacttttctatatgctgtatctacttggagcgaggttgagggaagaacctatatgtagcagaacaagatagagaaaggcctatcagaacgtgctgggaagcaacaatgttagccataggaatgacaggccctcctaaggtgtttcttctatctgtttatcaacagacttggaagaccaacacagggagccaacacggaaattaaaacaaggccaataccaaagccaccgtaattcagagacatgtttcctttattcggatgtatctagaaagaaggaaagggaccattagacatgcagtgcagagccatgtgccagactcatgtaggaaaaagcgaacggtgagattcattttctcagttctcgctttatgagtggatggcatgaactgcagatgagattgtttacaagccacgagccatgatgtgaaacaagggcagaagccgggcgcataagcagaagctaagaagacaaacccttgcctatataggaagctgggaatgtcacacgtaatagcgggagccacagttacctgtcaactgatcgtagaagaattcgagttcgaagagtgagcggaggttgctacaaataagcctgatagccaagctttcaggcgatatagctttctccacagtcttttcgggatacatccgattgaaaaggtcatcataccgatgtaaatcataggcatagaacaacattgcgccttatcgggaagctcgggatgtcactcatattctgcagcctaatggccactgaggctcgagctattaggttgctagcgtgcatcgtgcgaggaggcgtcgatttcattggctgtcttgttcatcctggcgtaaacgtgctggatgggatggttaagatgcttctgtggtcaaaagaagacctggcaaagaagagagtaagtcttgtacatgtctttccgtggaaggcagtgctcgtgctagaagccagcggtgagtcgctatcacttgcagcgacggcgatggtatgtgacgaccacaacttcgacaatcggtccgggatctagtcaaagaagctatagtcactaggcctaattgagatcccgtactttcacatgataaatctgcatggtgggttgatattagcggccatatttctatgtttacttctttctagtcattatctaactacagttgagtattctggtggtaatccattcccaatcagacttcacaagaaaccaaacacttgcccagacacaaagcgaaccacttgcctgccaagttgcatggcaccaatagaccggatgactccaaggaagctcactacgagctaaccagggggctgtgaccgggcgcaaagcatgtgatctgtataaatccgtcttgattggccaaacttggctctaatttccgttggcctcctttattggcagcctggacgcttttgcacgcttttgctaggccgtttatggtgttatagcctcacattgcccttgatctgcccgtgttctcgtataggattggaccccacacttgactccatcgacatttaagaagacgccttgcgctcgttgatcagattcttcctttaccatcgaactacggacggaatattcaccatggaaaacaacaaagaatcaacagtggctattacaccggttgctgccgtcgaaccaacaccaacaccaacgccagatactacagtcgaaccaaccgcaactacaacaagatcattgccggtagccgacccaatggcgatcatacccgcgcagagtggacctcccccacaatacgatgagtatgcatctcggtctaagaaaacatcccaagctaacaaaaccagacaccagaaagacgcaatcacagcacctgcaccggcagcgacattaccacaaaccaacgagaaagccgtcccaaccggcctacaagttccagtcgcccacagcgttatcccactagcccaagttggtgaaaagcccgcatggatctgttgtcccttttgcttccacgaggtccaaaccatagtgaacaaggagagcactagcgccacaacgtgagtaggtctatccccgcttcaccttggtctcacttctaacgatcctatctctcactttagtatggccgcagtgtgctgttgtatcttcggcggaatctgctgtgcatgtctaccattctgcatggagctgtgtcatgactcccatcatttctgtccaaattgcggcgcgaaggttgctatacatccgcatgaagatgaatgtgaggtacagacgtttggaccggactccactcaggcgattattcaagcgccggggttcattcagcctcctcaggcggttatgaagaactagggtgacgatgtacatgttgaggagtgacggagaaggaatggactgctttgcttgatacctttgtttactctgagacccgcgttactttactattattaatgaaagataagtcgagatgaagcatttgaattttatcatgccctgacgcagttaactgggaccagacatgaagaaactactaggtcgcttaatatctctaactactcttagattgacgttactttactcttaatgaagaaattgtgaacaagcatttgaattcattcatacctgacccatgcaagatggaccagccaccttacacaggtcagggcccgggacctaacaccacgaccccctcaggggatcaccccatcggcattgggcatggtgccaatcagccgctggaacaggtcagccagcatggcagccccgagggggttgtggaagttgcgaatgaccctcgcaaactcaatcttggtctcccagatgtgtgtgctgagagcctcgattgcctcgcaatcgagcgggatggtgtttgccaggacggcacgacggtcgatgctgtccttgaggttgatgatgccaacctcgaaggcgtgacggtaggggtcccagggggccaccaaggccgcaccggagtgctggctcatgctgtgtaggaaggaaggttagcatgttgtcaattggggtaatatatagggtgagacggtcacgtgtctcattggtttgtttgcataccttgcggtggagataccggtgggaggagtatgaaggatgtgggtgggcgtggtgttatactacacacgtttaatgagatggaagcaggattgggatggttggagatgcagttgtgatgatgcagtgcgataggattgatggaacacacggacgtaagaacgaaagaagtttttcacaagatcgagaaataaatagtcacaccattgccttaagcttaaccgcgacatgggtcggcgtcgagcagagggtccggaacatactacaggctcggcgttgagtagaacgtcgaggaggaaggtgataatgaacaatgatgacattcagatcaaacactatagctttgagcctgtcgctttggcgactaggtgcgcattgacaggcgtaacagcctttccagtttgatagaaagcagtaatattctccatacccaacctctcaaatccgatatgtgagtccactgaagcaccggcattgtgcgacatcatctcaacattcttcatgcttgcaagctccgggctgacgcgcggctcattgtagtgcacatccaagcccgcagcagcaagcttaccactcttcagtgcgtcaacaagggcactctcatcgagcaacttgccacgggcgatattaatcagtcgcgagccgtccttcatctttgccagcagagatgcattgaggagtgtctccccgctaaacggcgttgcaaccatgacacagtctgaaacagcaaggagactgtccatggtcttatggtatgttgccttcgagacggcttccagctgtgcgggcatctgcacgatgtcgtaatagtgaatcttcatgttcaaggctaggaacgccttctcggcagtgcgccggccgatctggccgaagccaatgattccaagtgtgtgtccattggggttgtgtgagaccatcgccaggttgcggtttgcgtcgacaaatgcatcgacatccagtgcgcgtgcggcaatgtgtgaccaagagaacaggcggaatgtggagattatgagccagattgcggcgtcggcgacggattctgtgcatgctgctgcagcattgcagtaaaccacccctataaaatgaagctgttagctatttctcctatatgcagcttcccgatcgctttgttgtatacacacccttcttcgccaaagctgcggtatcaacccagtcaaatccagcacctgcactggcgtagaccttgcaagagtctggtagcagtgagatgagctcctcatcccagttccccatctcgccgccggtattccagaatgggcggtagatggcgaagaaatcgccgaattggcgctctttcagggctcggataaactccggccgagacatgctgtaggaccggcggatctcgaagacatcttggaacttgctgtattggtcgtgattccagcggatgtcatcaccgagatggaggacaattggtttggtcattttggatggattttgggttgtatagatcggatcggaggttggaatagggttgggggtatttggtgaggtcaataagaaactagtacatggaaaattgtaaaacttttatcaaaatctcattttctaagctggcaatgtggaattagttaaatatctcttttccgattgtcttgatgtttgttgcggctattgctattctacgccacggctattgagcgggtatcgatctcccggctaatgaaatccgacaccaaccaccgaggtaattattcaagtctaatgaaaggccaaggagaggtaagatggttgtttttcaatggagatgaatatggaagatggccctgattccgagcccattcttcttcgctctgctgggggagttttgctttcattagtggaagcacattctccagtgtccctttaattcggttgtaacgagcatgtcgagactttctgcgtgaattgtgacggcttggtaaaggagttggatctataagaaggattctgtcagtctatatttcatagaagaatggaagaacagtttcataaatgcagcaaatcatgaaaagggaatagaattggacaacaggggcttttttggaagattttaaatcttcctgattggcccttatcataaggacatgaggatgcaaagggtaatccacgtaaagcaagatgaacagaagacatgagcaagaaggaaatgacattgtcgacatgaggcaggcaccttgaagggagataaaacagcaagacgtaccgggtagtgtcatccttgacctcgaattattcgcaagatcgagaggattcatcgctcaatccaggcagagactgtctcgttgagcattgtgtgccacgcagttgtagacatacatctcgtctctgggtaacagaagccttgggtgagtctgcagtttggttatctgtttccccatcccttgagagtatattggagaaaggacctagaacagcaaggtaaggcgaataagaataggataaaatcccttcatcactgcagtgctttatagcttgtaaagaggtggtagagggaggataggagaaagtgaaatcgagtagacgaacgttctcaatagtggctagagacttgacctgaatgctttgatgaacttatcgtaagtttcgagatgttcggtcgcacatctcgatcttctgccattcttgtgttggtatcggggcatctgtccatggatcgagaactttatgattggagacatcgacaaagtcataaagttgcttatgggaatactcgttgtggaagaagaccttccagatttctgcgtgaggagatcgatcatgtcctaatccctaatgacagtaacatctaatatgatcctccattcgcccagatgtgctcagacaccttcctccatgacaggtggcagggttttgactgggtcggtcgaaacaagctacagcgcactacagtgatgagaggatcatcgactgcaagtgccgtggatgaggatagtttgactagtgatataaataagagcattaaatagtaatttggcatttaatgcttaaaattgtgtattacctcttattcttatcaggcaaatataagtcattatgtagggtatctgatactctttaacattcgtctcacttgtctatcacccagagtatcatcaagttgctcattttgactcttttcctatcattttccataattttcatgttttactttggcactctcaccttttaattatactctttctatttgaccttaccaactccctcctcttccgattttataaaaatcactctttattcatacaacatatcccttggatttctttaacttcctacatccacgaatcctgccaaaggctgacaattaagacccttttgactgacttcactgctctgatactccaaaccctctgacccatccagcctcaactatgcagtgccatttaactgagatggcgaaatcaacctcacataccaccacctcctcctcttcctacaccgacaccgagtcctccatctcggccggaaattatgatccctccgaatccctccgaatccatctgactctcattttactggtggtcatgctcagatattctggacaacaacctgaacggagagcgtgacaaatttggactgaggattgaagacgccatatgaaggataatctcacaagagacattctcctcgagacattcctgctttatctcgaaccgacaaatgctccgtgatactcgcttcacttctggcacgtcttgccactagagtttgaaaggtttccttattcagagacgacagggaaaacaattagcgctagaaaggcggcaaggtccaatcttgcattgcttctcacttttgaccttatggtgatggctgtacatgatgcttgatacttgtttacagcccaaaatcatgccacaccccctcctcaatccgaggttgagtgagcggattctgtgcaagtagatcccaatgaaaatatgtacattgtaatgtactcttaattacatatagcagtgagttggccaacgaagaagcaaacgattacagccaagtcgaccgcagactggtatgcgcttgaccaaccctcacgagatgcaatgtggctaagcaaagttgcagattcacttggtctgccgaggccagatctcacggtcatattcacggataacatcaactctcagctgctacttacaaagaagggtggcaaatcagccacaaggtggttggcgctaagatacttcttggtcaaggaggcagttgcccaagggcacgtcaatatccttagagtcgacaccaaacagaatctggcttatggatttaccaaggcgcttgcgatggagcaattccaaaacttcgtgagactgctcggtatagcttgaaccaccaaggaaagttcaaattttttcaaccattgcagtacggcatgtcatcatcaacaattctacatcaatcaagggtgaatgtgagatctgtaagggggatgttgggtatccagtaaggctgacaccagctagacgtcattaataaaacatttcactccaatatacagaaaggcaaccaagcggaaaataatacagaggaacgctacagcacagagactcagaccagctgaatacaaatataacaaacagtgcacacgcgctcgccaagatacattacatatcgaagaaaagaaacaaactgaggataaatggattaaagaacataagaacaaaagaacccgcgtttaaccttaagccaacctcgggtcagatggtgatgtcgtgaatctcgcaccacttcttcttgcatgtggcattgccaaaatggtaggatcccccattcgcccatatgtgatcagaaaccttcttccatgatacctttggtggctcgttcacggtcaacccggaattgggcagcgagttgtaagtgtcatggcgctctgcgtaaattgcgacagcttggcaaaggagtcgcatctataataatagatcatgtcagtctatattatcatagaataatggaagaacagttcacaactcacatctcgatcatgccatgcgggctttcgcactcgctggtctttcgacttggtgagagtgcggtatcggcctcgtagcgtagactccgcctccttgaacccgcccaatcgcttgatttccttgtatgatagccctcggctcttgcagtctatgagaaatgcatttctctcataaatgtcctgcaccgtagcttcggtcccgccttgttcttcttcgctctgctggcgggaccgtccttcggtggttgagacggagaaggatggactgaagctgcttgctgggttctggtccggggattcgtattctgtgtcggagacaggtggctgtgttggagcgtctcgatgcagtccaggttgatactcgggaccattggtgatttgatagggtccagaatcttgcaaatgggaaatgtagcctatgggactattcgggcccaaagacagaggcgcaggcccaaaaggctccatgggcaatccattccttggctcgggttcattgtattcggctgggtagttgtatgtattggtggccggccaaggtaaattgtaaccatcctgtgtatgccagctgtcttctggtgggctagtgaggtcaggcgtgggataccaagcctcagttgtgctgggtggttgagagataagccattggatacttccaccatagttcagcggctttgtgtcctgaggagtgatggatgagtggggatcgacctgtcttcccgtggggtagttggcgagagtcgtgttctggcagttgaattgggtggtggaaaaagcctgctcgtccattttgacatctgggatttcaaaggaggaaagaggaggtgtttccccagtgcctaaaaggaaggaattgctagccattgtgaacattttgccctgtggtgctgggtgagcaagcccagtgtgtgtttcaacattgcgtgtggtgaatggctcgtcaaagtgctcaagtgattcaagatcagattcacagtaagtgcttccgttgcttgaattcgcactgttgaggtctagccgagtcgtgaaaggagacgcgccctgcgaatacacagccatgtgaggatcttccacatggagaggcatgtagcgcttgtcctccgcaagaggtatcgagtttcctggcaaactattgcgattcatcatggttttagcaagctttcgaggacgacgttgtgtttggattgttggagggtgatgtagcaattgaaagttcagagaggaagttgatgtggaggggcaaaagatcgaataccagtcggtaggggaggaggaaagctgtttatcataatcgccaaatgccgaagagtaagtatactccttcgggtatgccatccatgggtctagcaccccaggaatagccagcacgtctgccatgtcgaccatagatggagaaaattgaaaataaaaagattaaaaggattcagaagagtattgcccagttttagacggttattgtcttccacgcttcaccgcaattgctggcgaatgttgtacacgggttgtcactgggtgtggacgaccgctatcccgaagatttcctctttgtcagtacacaccggatagtgtggagaaatcgaggagacctgcaggtttgaccgttatggaggttagtgcttttttatatatggagaggtttcaccagaacggtaagaactgattgggcatcacttaccgtatggatataatagccaccgtagactgctagaaggcgatgtcacgagtgaaaagtagggcaaaatttcttcttgtgaccttgatgagcagacaaaagcctctagtggctctcaagagtagctatacttcgaaaggggacggctgttcggcttgagagatcaatatgggtaaggatcagggtgtaggtcgagccgttggatgcaatgcagtctcaggtatatcggcaatgaccttaggagaaaggaggtgaagctccagattgctgtagggttatatctcaggtagattgccaacacggagagattgtttgagagacagtataaaagttggaagtcgaggatgagggatggaattgataaggtttatatatcaatttacgaggagatacagcaaggctagggagcgatattttccgggtcttttaatagacagaatgaatggatctaaccagtgtacatgaaccatgtctatcatccgccagctcatttcgacttctcggcccgtttaatctcagctgaggcccgtgcaattactagatgagcaagaggactgtcggtatgttctaggcatgtaggagacggagagaaacaaagagaaatatagacatgggttggtctcaagacttctgaaccctagccaggtcaaaaatctcaggtatgtaaatcagctggacccccgtcgtaaccgtgatccacttgccgaacgtttcagatctttcctctattgtctagcgtcatgtcttgatttagcctcgatactgtcggaggggaatgaatgtctaggaaatatgtgaaacgggagcgaagagtgaacgggttgtattctcgacggcttcctgaagaagatcttcactcccggccgttaggcccaagttaatatattcccgtcaatatttgtttttctttgccctcgatatctacattttatcccatcctgagggttgggtgaattggccccggaactgcagcccgttggcaacggtcctagcattgctgatctccaccatgtacaaccctaaatagagctgctatgcccgtctgtgggtctacctgattgacaaaccgtctaaagctccatgatttggcggtggctcggccagttttggaatgttccatcctgaccgggtagccacagagagcttctggggaagcctaagtggcatccgggccaatcagatcaaggggcccagtccaacctgcttgagaaaaagcaatgtaaacaccatagcggtagaagcaatttcctggttggagctggttggacaggaacttgccgactgacgtgagctatctagtctttgaggctctatcgcccaatactaatgccaacatgagttcatcgggccttacgaaatgcagtgttaaagatcgacaagatcctagccagaatattttctgttgggatttggaatatagtaaagctataattaggtgcattgaactttcaaagcaaaatatgtcattagcttccacgattgccgagagaatacaactaacacggtgaacttaacaaaagaactcccgagccccttttccccggatctccactgtctatagacggacctattcaaaagaagcttctttaacgaccgctggggtggcctaggtggcgttgaaaccgaagggatcaaaaacgagcctgcagcagcacgaacgcgtaaagattccgtccggtcccctagctaggggaagacctcagctcctgattctgtgggaaagccccgagggaatttctttctttgaggcaatgtttctgttagtgttacagcttcgcagagttaccgcggaggtaggtttgggatttatctagtttccaggttgcaggtgctcgatcgagcgctaggcttcatttcccgcatatgcggatcatatttatggatcttattattattccataaataccattacccgatgatttatcctatgagacagcatcaagatccgtaatatccggaacaaatctggggaaggggatggaaaagacaggacggtgagttgtgttgacacgaacagtggagggatgatcagcggagaaccaaaacaagccggaaagaacctatcaaaaaagcaaaaagaggttggtgctatctaatttaaaagggatctctcggcagcctgttggttgcccgttcgttgtcttttgggtattgattggttgaattagggcttcagggatcccagataccggggtggtgggtaggtactttagcgtgccttagtgtagtttatctctgatttttggcactaaaaatgccaagtagatcaacaggttgaggtgcattagctgctttgctaaaaacagaaacaaagcctacaacttacgataatttggaaacgtgacgtagaggctgggagattcttgttcaagactcggcttcttcctaacagggaaagccttgcttgtcgtagaccaggaattggaatttctgattgagacataagactcaattccgagtttggagcaacatccagccgactgcatttcaggtggcttgctggcatgtagctatgcactgtggcggttaatgcgctaacaactcccactgaaaaagatattgtgacacaatgttaggttttgtttcattatattttacctcccaccaaaggtttcgggaagtaggagatttcgaattatagctcctagagctggtagtacttcttcatcttccatggggtgccggggagatgcttctcatggatccggacttgagcgggggacaagcttatcagttcccctagtttcctgctctcaatagggaaaatagttgtttagtatagactttcataaggagcacgcaatataagcccagcccggtagaatgcaacgcaggggaaaatgccacacaaagacatcgaggcaatcgcaatagtagaacatgttatctacttgactaagcacccctgtagagcttatgatataagatttgccggtaggaaatgccataaagaaggaattagtgacggccatccccggcgcagaggccagacgtttgaactccccgtcgtgttcccgcttccgtcggccagctgcgtcgttccgggacattaaccagtcaaagagtcggtcaataaggagtagattgagtgaaatgagccggttcgcagccctagtcgaagtgtacagtatcttcggggaggtcatgaaagtgcgacggtgtaggtcgatgggaaattatcttgtttcaattgttgatagatcagttagaccgaatgaaggatatcaacagttgatagaaatgaagaatatctatgcacacatagacacaaccgatatatgttcggaagctggtgtatgctaagcaaaatgatctctcggttcttttttagctagaactaggaagcagctgagaagtcaagatgaaatgcattcacggaaataagccctgatgttgctagttcagtcctgtagcatccttaaaatagcgtatagttctaacttctaaacacttgcgagaatctgcgacctctttaagaatagaataagagagacgtgagattcatgaagtcaccccttaccctggtttttgaagaaggcgcaaccctaggatatataagatcgcaaatatcacaatgatttcgaagaatgataacagcgcttacactcttcggctgtctccagcagtcggagtagtaaccaacacccctgtattttgaaatttataattagaaacgaagctaagtagcccatcctacgttttatatatcaacgaaatagaagcggtacatgttgggctgcttattgttcatagttctgtttcaatttagggtttactgtcggacatgttattatgttattacatgttcctaaaaccgagagttaagcaattctaatggcaatagcatcctgacttggagcagtctctgagtacatttccttttcctctttttggaaaggtagagggaacgaggccgcacgccacatagaacagcgtgtataatcttctaatatcttaagaaaataagtatgaaacctagccaatccatgcatggtcggggcaccgacgcggtctaaatactcgcgtcaatagtttgaccaagtcatattgatatcgtgaaattcacatggggtacatgccaattcaagccagttcgtggcgacgtacttcgtaatccgtgaacttacgggaatttctagactcatggtatcatctaggctttcatcgaactgcataattcctatttttccctgaagcattgctcgtagtccttgaccaattcggctccgatgccggatgtgctaagttttcggaccccgtataggatggcgatcaccgtacacataggagcacaattcctgtagctctagaaccttagccgaaatcttcccatagaaggtgggaatatagaattcagatactatgcccgagattggccgtacattgggtcttgatctatactatatatcagaagagggggtctgaacgcgtaaatagacttcgctaagaagataatgggtgtttctgcggatactggggtgttaaaatagaagagtcttcattgatatcaaaatactcagcatcatgacctccgctattaatgcaaaacatcaacggcaaatgattggaagtttgagatatggtcggaaaaatcaaaactatccagacattgtacctccattggaggaggcggaggttgaaaatgtccatgctgctcaattgcctattttggatttttaagtaaggagagaaaacgacttccagggaagttagttggacgcggggcactagaaacttccagatgaaagactacatagaatatagtgcatgcaataagactacggcttaactaatggcgtatcccatatttacggtatgacatggtagatgcaggtaaacaatagaaaagggaggttggcatggctgcgagagatatgtaagagacatataatgtgagaattggtcaaggaaataataggagaaaacatatacaaacgaacagatagtacaaccggccggccgcaccgtcttgttgacaattcaagtgcccaaatgaactatttcttcaatgatgagcagcataaggcccacgcggagttggtgctgtgtgatccgattcctagggaatgcaagaacccccttaagccgtccgcatctcaacttcagaatgaacgcgccagactacttgtgttcatggttggaggtggtgcgatgttcattcataatgaggggactggtattacaagttggaagtcaagtgcaagtagtccaccaggagcaatgtaggaaagtcatcgtattttaaaaagatttagtcatacgcagagcggcaagacacataacggtgacgtcgcatgagtgcccaacgagctgaatcttggccagacaatccgaaaccagactagaagctggatttctagagttgcttagctgccagggctggctgagatatcgggatcatgtatagtggggtgtgaaacccgttaaggttgcagcattctcgataggcttggcgtccctgggaccctgatggccgccaacgtttcgacaaggtagaatagctgcacagtataacacctgaatctcagccgttgattgtcaggctgggcttatccgttggagtgtggtgtacatggtcctgtacggcagcctgaaaccgggaaaagtctggcaccacatccctagcaatgtcatggtctaatgatgttgtttgttggttaactgtagtcggctttccgaggatgaagcgatactgtcaggccaccctttacgaccaagttgatttgcagccgcgcgagacacttgttcgtggtagccagtaaagcgccgcaccagttgtcagatggaggtgggccgtattgcgacaatgtaggttgactagctttttgagagtgaaaggttggtctaatgcaaaatcaggtgacggggctaagggtatgggaatgaagttagaaatacaatacagaactcgttcattgggtatcgaaagaaacaagaaagaccccacgaagacgatgcaaggggatctagtaaagaccgaggtgaagttgagcctccaggccgtctggggtgtaggtacgaatgcaaccaagaaagcattatgaagaatcctcgaagctagaatcggaggaatccgacattgaggagtcccttaccgggacagggacaggagcgccgatactctccaaacctcgagatttttccagagctccattggaaccatcgagctttgtattaggctcaacaccagcttcctttctgagtcgctcatagttatcgccggcttctttgatcatcgcctggatctccacctcacgaactgcgatatctgccttctccttcctcagttcctccatccggctgatcatctgtgtttttgcgacttccatagatgtcagagacatgcgcaacctttcaaaactgctagccagtcgtggaagagatgtcactttgggaggagtcttcggacgatcaataccgcttgacttgccacgacccatggccgaatgaacctgagcggcttcataggcagccttttcctccaagtcagaatcgtcttcatcggagataccctcagcatcctcaataaggtcacgcattgcttcacgatccttccgcttcttctcgcgctctgcctttcggccgagcgccattttgccatcctccgtgaaggcctcgaacccttccgcaaagtcctcgtcgtcccgaactagtcttgtatcttgttcgacttctttatctcctcttacaaccgcgtcccagtcgtcagtgtgggccgcattgttcacgtccaatgaaatgaactcgtcttccgcaccgtgttccatagctaggcgtgcgcgccgggcttttttctctcggatctcggcttcgcttgggatatgtgcttgtgccgggagagtcataatctccccaaacttagctgcaacatcgacaaccttgctggtttcatcgtcggtagttgtcttcggcgttgagggcgtggaatcgcgaagttccttcaagtagtcatggctataggtaggccggtcttggtcctgaccgactcgtgcagtgattttctcagataacagggaaggaagttgaccggcactttgttctattgccttgcgtccaagaccgtggcgttttggtgggactacttcgctgtcttggtctccatcgtttgacgtctcggggccgaaggataactgcaacttggatctcagcttcggcctagaggaagctggccgcttaacgaccggctctagaaatctccatgtcagcttcgatcgtggtaggcgaatatctagggtagaaaaaagtaatcttagtccacatacctggcgcaacgcctccctcgtcctcctcgtcatccctgccaaccttgcggggctttctgcgattggcaaatttgctgctcatatttggaataacctagcaatcaaaagaggtaacgaagcgatgcaagttggtggcgtgagaggtgtgaacatgaagctgccagctcttatcgcatatctcatatccggaatatcgttcctccggcacagcttgcaccaaactcccaaagtcatcgcggtatcttgaatcttgacaaaccccaagatacccaagcaactcgcccaacatgcctcaagctcagcctgaattgaagaaggttagtgccactgctaatatatgggtctttattgtcctaagatctcagctgacgtcgtgtctttcgtgcagtacatggagaagcgggtcttctgccaactgaatggcaaccgcaaagtcattggtatccttcgtggctacgatgtatgtgtacacccaatgatccagacttcgctatgtcggggttcccgcggctcgttgttgaagataggaggatgacggtccgatcgcacgcggaataactaaccatgctttcgcgcaggtcttcatgaacattgtcttagatgaggcattcgaggagaaggatggcgcagagaaggttgccattggcatggttgtatgttcaatccctatggactagctaagatccccgctaatggatacgcattatcaggtcattcgcggcaactccgtcgtgatgctcgaggctctcgagcgcatatccgataaataagctacgcatctacacgcacaatctacgacgtttctttgattgaaggggcacgcacataggcaccactcgatcaccgagtgctgggaaaagagctaatgctactgggagtttctgggtcggtttctcttatgggaacaatcaaaaccttttttctgttctattttttttctgctcgtttgctacggcgcattttagacgactatggctatcccaatgactttctgactggtacgtctacactagaaatttaccaggggggatgaacacaaggcacaactagttggtattggaatcggaagataaagctgaatcaatattacgcctgggagcatgctttggctccatcctcctgcctgggtcgatgagagagggtagagataataaagagataatgataaaatacatgtgatattcgaaggaacaacgttggatattcatgtgggtcgaccaccaaacttgagcttcagcttgggtgtagacgtggtaggggctttgggggttgcgctttgcgcaggtgatggtcttgggatgtgaattttggggaaatgattgggagtaggagttcctggagccaggccagttttggactgcttgaacgtaatgcgggttgatgatggtgcgtgcatgccctggtcctcgcgcttgcgtttcgaagccagacccatgcggggtttggtagatcgatagaaacgtaacttgccatggccttggttttgcacgctccaatatcgaggaagtttcatccgcacgagcttggaagtgattgggtcgtacagtgtacggcaaaggtcggtgagctcggaaagttccaagaggcccatggacggtgagttacatgctgcccacatacattccttcatagatgtatcgccagaaagctctcgtttgagggcttcgatggcgccaggaatagtctggcgtcgtgcgatgtcatctcggcggatttgggtagatgattcttgttcgatgatcaaaccaccattttgggaggcttcggtttgttgaggacgaccgaaagcaatctgtgctagggcctgacctagcaaacgtaaagattggtggcgtatccagggcgaggaatcggccgataatgtgaacataagccaacgaagaagctccgggctgtgggaaatatccaggtcgatcaagcattggaaggcttgcatccggagaaggtcgtaggttcccgctcgcgtgtatggaatgaaacgcatcaaatccaggtccatcatcttggtttgcattaattgcgcctggcattgaagagcagcgcgggagtagaggttctggaaagagctagaccattcgtccatgcgtcgatatcggtcaaactcggcgatagcatccttgtccagttgttcctcggcctgagcctcgaggacacgttccatatcgaaatggtctaattcctcgtccgtccgcacctcgctcttaccaagcatcgcatggcagagggacttcatcaaggaggcaacatagaagttatccgagtactcattgttcgagttgtcattgaacttgagtttatcgaaaaggaatcgcttcacccttaatggagttttgccactattgtcccggactttagagattgcgtcagggatgacttgctgaaggatgtaggccgctcggtcagagaagtcattcgatcgagtcatgggcgatcccgggagacagaaaagctcctggaacgccttctcaagatgatacagtccaacccaatcaatctcttccttggcatgttttaccaaggcacgcgcagccgtagtacgtatgccatggaagtatcgactatccatgagcgttcgaacaaagatcgtggaaatcagagggtgctctcgttgagcagtcatgtattgtaatgactgataatgttagcatagtgactcaacttttcaagacagcagtataaattacctcgagttgggccacaacatctcgatcttgctgaagctgcgagagatacatgtaccctggcataccgagagacagtttacagatccactcgaagtctgcatccattcgtatccactcataggattcctgtcccattcgctcctcgtcctctttcgtccaatcagccaaacgccaagcctgtgtctcttcttcggtttgaagcacatcccccaggcagtacagcagaacctcttcttgaacttccgtatcgcccgaggccacggctctttctctttgttttttgttgcgtttgagccttttgtacttcgtgttgtatggaatgtcgaatttcgtcacgccctccttgatctcaacgatgtgctcataaggagttccatctgcttcgtgaatccgaagggtcattgaccctgtgaagaccggctgcactgcgcccgcgtagacgtgccggacctcttccttcacgtcgcgcaagaatgaatccttgtcgagatctcgagggggttggggttctgattggacttgtctgatcatcatttcaactacgagcttcttcttgttgaatcgctgggttgcttggaatcgtggacatcccgccccgtatacccattgttggaagaatacgtctaatttcgcatgtcccagtcgctcacaggttttttggaacagggaggatgtgacggctccattgggtatatcacccatgcgagagttgaggaaaagtcgagaaataatgcgagacatcgtggccttaccactcgccttggtcagtcggcgatcgagaatgaacaagaccaaaggcgctttcaatgcaacaaagcgatattcggaggggtcaaccttgagaatgttacccatgtcgtatatagaggggcgctcgaagtctaggtcgcagacttgatcagacatctgcttcaatctgaaacggtattcgttgtttccgcaaagctttctcatgaacgtgtctgtaatgtaccatgccacacccaccgtaacccacgtatccgagggttccgcaggaatgatgttgattccagtccactgacaggccagaccgtgcacttgagcccgagtagagtcatacatggggtcgatcatctcggctgggaagagcaggtggctgctgcatattgacatacatgcagtgggaaggctatcggttggtaaatcgtcgacgaaacaaatcttgtaactgccgaatggataagacccgtacgacaaagaaaagaagtcaatcgcctgggccatgggaaaactgctgttttggacttcgtcggctctacccgggaggcagaatgcgtgcaaaggaatagcattttggccaagttgctcatcctggtcactttcacgaaagtcggccaggttgacatactcgaatggaccaatggcgaagccaatttgcaaggctcccaatggtgaatatgacgcaaatgaaactgttttgcgggtgtggtctttgggatcgacaatgtcatctgtcaggtcgccggagcacaccactgacatatcaaggccctcgtcgtccggagaaagttggcgggttggcgcttttgggcgggatggggtcgctgcaccggccgcatcttgggtcttccggtcaaaaacataaccaagcgagctgggacatgtgatagaaacctcccaggtacatcgcgaggacatatcatccacacatgggaacaggggacagccgataccagactcgagtgagttagtggtgtaagcatgaggataccgtcgatcaccattttcgacaccgacgaattgtaatccatcccgaatattgtcaataacaaattcgatgttcactgtcaaagccgtgaatcgtggaaggtttgcctctggcgccctggtactcgaaggaccatccacattgtccacagtagattgtagcgcgatttgatcctgtgcttcggccgaagatgggtctagttcatcgatgcggacaccctttggaattgcgatgggcagggtaggtcttgggggagtttgtaacaggctgtgaatcttcggtgtcagtcgctcgtgatagtgtacaccgtagagttgtagcgactcgtagtgatctgtgtattttgttgttgcaggcttgccgttaacgctcagctgcttaatctcgccttgtcgaaaattcaaccagattgtcccgagatctctgcggcgaggatgaattgtgatttccgtccttcccttgaggcttttggatgctagatcaatctcaagttcgactttttgatgtcccacactgaatcccagatcaaactggcgtgccgcggcaccagcgggcagttcgacaacactcggcatgatattctcgtcgaggcctgcggaaataatgtcccagagcctgtcctccagtatcttgaagattcctcagtgacgagatgcgcggggagcgcttcgaagaccatccaccgtcatatccaaccagactcaatatgtgattgtagtattgagggcggaaaaaaaattcgaggagcacttcgcgtggcgcagatcgagctccagatgacgatgaaatgcgagatgggcgattacgcgattatggtgcacggtgtatcgcacggcgctggggtggatcgtaggttgaagaaagatttaagtgagccgcaattaggaagatcgagggcagattagctgcaacaatgcgactcaagtccgaacaatgcactagcaaatcccgtgtggtctcagccaagttgagcttcccttgttcgcgttcccgatgcggagcaaggcacgtgatttcaacctgaaaatccatcttgaaacgcttcctacctctccttttctccacgtatccttgagcgccgagatttgtgtttaaaggcatgatttgattcgctgtgcatttctccattatacccacttgtttgccgaccgcgctatgaactgaggtgctggtgtttcccccgactatactacaactctgcgcggtgacacggcccaatcttcaaaaatgagcgcgatatatcgcatggtccaaggttggtgatatgaagccattgactggcatatttgttcctactcacttgctaattcgaaccttcaactcatacagagacccaagattccctctccgacgaagccctactaccccttaagtcctacaagtattcgagtgtcgataagtcgttcatttctcggtatatcttgaagcactacgtatgacagccttaccttgcccgatcgttaactcggaataaacaattgactcttcccctagtggaatgccttcgtcgaacttgtgccgatgtggatggccccgaacatggtgacccttcttgggttcatgtggatcgtggccaatatcttcatcattcagattttcgtcccagatatggtgggacctgtgagtgttcctgttccttactgggtgttttatcggaagtggcgagttaatcggaaatttcagggtccctcttggatttacttcagctttgcgcttggcttgtggatgtgagtgaccggctacccctccatccacatgatgctaactcatacgaaataggtattcgaccctcgacaatgtggatggtaaacaggcacgccgaaccggcacgtctagcggactgggagaactttttgagtttgtaccgccctccgaaaagccatggatggatcactaacaaggtacagtcacggtatcgactctttgaactgcaccctggccagtctgctttcgacagccgcaatgggctatggatcgtcgcagcttggtgcttggaccgcactcgtgccttgcctggccatgtatttctcgacatgggagacgttccacactcacacgctctacctcggctacttcaatggcccgactgagggcctccttatcatctgtggaattattatttcctccggaatatggggccctgcgatgtggtctaaacccatcattggattccttgatttcccccaaatcttcggcaacaactccgtcaaggacctctgggtcccatttctcatggctagtttcttcctcgcacatctccccgggtgtattatgaatgtagctgcggcgcgcaagaagcagggtctgccgttcgccccgttgcttaaggagttggtgcctatcctcgccttcactttctgcaacatcgcatggctgttctcgccttattcgactgttctttctgggaaccacctcattttgttctgctggattatcgcattcgtcttcggacgaatgaccaccatgatcattttggcacatcttctgagacagcccttccccctttggacagtgatgcaggctcccctcattgctggggcgatcctcatcaacctgcccatgatcgggttcccggtcattgccccctggctggaactcttatatctctgggtgtacctggtcttcgccctggttatctacatgcattgggcggtcctcgtcatcaaccgcatcaccactttcctcggcatcaactgccttactattcgaaaggataaggccgctgcaagagacagagcctatcgcaacctcggtgaatcgtcccacatcgatcagtctcgcgcttcgactgacacatccaagacacattaacttagtatgcgccacactatcttctatggacgaattgacgatcgacactagttccctgttagagtggccaaaagcgccctggccggcgcattgtttaattgttcaacctcattgtaattatgaacatgtccattccttctacgtgtgttaacatcttgatctgatgagagatataacaaatcccagaggggtggattttgatgaaatccggcatggaaattgtaccctgctattctgcacttttgtacttacaagattattaatatttgtgaatagatcaaaatgatttaaatgaaacccagttcaagttcattaatcgagagaaataatacaggaaattagaaaaggtacgcccaaagaagaacaatcaacgctggcgaaaagagcaaaacagaaaaaattacaaaaacaccgccaacaaaaagttcaaatgggattctgctcccaaattttcatttgtttcctccaagtccaagagcgtcagtcagacctcccagaccaagtccattgattattttatccaatccaagactgccaagcagtccattcaacaatccaccgagaccaagaccatcaagcagacgaccaaccaagccaagcacaccagtaagcaacaagccaacggcagcgatgatctggaacaacggctcagagagcagaccccagagggggttcagcgctttcttggcgtgaggcatatcagcaatacgtttcttgccgttgtcaatggtcttgacaaccgtctcagtgagctccttgatcaggtcggcaagctgatactcctcaggagtggcatcgcgagaagcagcgcgcgccttagcggtcgcggcgatgcgtccatcggggtcaagagcgcggatggctccgttgcactcttgcagaatgcggccgccttcttcgaggagcggcttgacggtttgaacaagcttctcctcgtcaaggtcctccttcttggtgtggtcggctttatcgcaggcctgcaagttatgttagtatattgcttttgaggtcttcaatgtcgggttggaacttacctcagtgatctgcttacacacaggcttgactcggtcaagagtctggctgaggatagagatcatcttctcggcgagctgtcggtcggactcagccttcgccgcagcctcctgttcttcggccgtgggcccctcctcgacctcctcctcgggctcggggatgttctcaagcaaggtgcattcgccgatcttattgccatcgttgtcaatgacatagccgttgtcatcaatactcttgccgatcagcgtggcgaggttacccacagtcagcttgccaataaggttgccgtcctcatcgcggacttcgccctccttgttgaccttgcgaccagacatggggttgatatctcgcttcttctcctcaggctcccaacgctcggccttaccgatagagttgccgttcttatcgaggacgtcaccctcctcgtcaaccttacggccaaggagacgcttggcgtcgccttcaattagacgtccgatgatcttgtcaccgtcttgcacaactccatctttgccgacaatagcgttatcgaatccaaagaatggaccttcagccttatcttgctcagcgccagggataagcccagcgcgtccaacaaccttaccattgtcaccccagatttgacccttgccatcgaccttacatccagcgaggcgcttatcaccttcgaggatacgtccaacgactgcaccagtagtaggatcaacaacattgccagacttattaacgaccttgccatcgagaatagagaggtcttcttcgggagcgggctcctcctcggggggctcgtagggctcagcacggcccttgacatttccgtacttatcggtgatctctccatcctcgtcgacagcacgaccacgaagcttcttagcctcgccttcgacaagcttaccaacaatggatccctcatcatcctcgacgaatccatccttggtcacaaagaggctgtccatgccagcgaagataccctcgggcttactgtcgatctcatcctcggggataagctccacacggccaatgaccttctttccgtcgtaaatctcaccctcgtcaatcttcttaccggcgagctccttggggttaccctcgacaacacgggcaatcggatagccgtcgggtccgatgacatagcctgccttgttgcatgtgaggccattgacagcggaaaagtcaggaccagcctcttcctcctcctcgggctcttcctcgggttcgaggcgctcagcccgtccaaggacgttacccttgcggtcgaggatttcgccatcctcgtcaacgccacggccgctcagtttcttcgcatcgccttcgatcagacggccgacgcgggtcgagttctcgtcgaccacaaagccgtcttcaccgacaacgagaccctctagaccggagaaggggccttcgtcgccatcgtgttcctcgatagggagtgccttagcttggccgatcacattgccgcggttgtcccagaactggcccttgtcgtcgagtgtcgagccgagcttagctagtttcttggggtcaccttcggtcacttggccaacgggcttgccggttgcttcgtcgatgatgtagccgagcttgttgcagaccttgccttcgagggtctccaatccggggatattttcctcgacatcttcggcagcatcctcggcggtgtcctgggcatcttcggcggcatcttcggcggcatctttggcggcatcttcggcgccttcgaccttgtcgtcgggggcatcggtaacaccttcggcggtctcttcagcggcatccttggcgtcttcggcggtatcttcggcaccttcaaccttgtcttcggcggtatccttggcgtcgtcgacattatcctcgaggttaatcttgccatcttcggcggtgtccgtagcatcgtcgacagcgccatcaacggcatcagtagcatcttctgcgtcgggggcggcatcttcggcggtagacttagccttgtcgacattcccttcggcatcggaaacaccgtcttcaacctgatcagccgcgccatcaacagcgctcttagcctgatcggcggggatatcgtcctgagcatcttcgtactgatcctcaacatctcccttagcgccatcgaccttgtcagtggcgtcaccagtggcctcttcgatggccttcttctgatcctcaacaggaaccaaatcaacacggccaatgggatcgccatcttcatcaacaatttcaccgtcgtcgttgagggtatacccgataagatcttcagggtcaccctccacaatacggccgacgatctgaccagcagcgttcttgataacaccgccatcagaaacagggaggccttcaagctgagcgatatccgtaacaacgttctcgagatcagcctctccgacgttctcctgggcgtcatcggcggcgttcttagctttgtccgcgacctcgtgcaagatatcgacgcgaccaatcaaatcaccttcctcgtcaacaatctcgccgtcatcaccaacggtttgtccgacgagatcctctggatccccctcgacaaccttgccaatggggttcccatcctgtcctaggatattgccgccctcggcgacatcaagacccttcaaagcagacaggtcgaacggcacgggtaggttatcggtagcagtcttggtggcatccttggcgccacttgtgacactttcagcactcttctcggctgtctccttcgtcttgccagcgacatccttagccttgccggccaagctggagccgccgcggctgagtggggctgcggagccagaggcagaaggcgcctgggatgcggcgtcgtcgggtggggagacggggcggcgctgctcggtgcgtctctttgacttcggggagggtgtctctgggatagactgctcgtcgacgtcgtcttcaattggttcgggggctttctgggagagtttgcggggtgtggcggtcttctttgtgaccttggggcttgcggtgacagtgctgggcttgctggctgcgctggagccggaggctttgcgggctttggcgggggttccggccttggagcccagctttgggggtgctttgttcacggcgggggaagacatgcttgtttcgggtttggatattttggtttcaagatgatttgttatacagaaatcaaaatccagtcggataattgcaaattggaatgcagttgtgtccgctaaaggcgtgggtatacttcgtaaaggcgtatgtgaaatataatgtacaaatcccgggaacaggtatagttcgggagtataatagttatgttgttgtttctagatgagacaaatagaataggaatgaatattgaatagaataaaccctggtacgattactggtgtttataagaagaggtcagtgattctgatatcatcgcaaaagtccatcatagctgtctacctagagactgtaaccaggcaggacacatgcagagcttactacgtcatggaccattgatatcataacgccttttcctataatcatttcttgaaatcccagttcgggggatcggcatagagctaatctacacgatgctcggttagggcgtgatacagtaggcgccgttagcatagcatcatcggcatcataaagcggggcaattagacgtgccaagcagatatttgtctgggaattggtcgatcgatgcgatacttccagggtaggctcacgaatcagaggcccgggactgtgatattgaggggaatgtggcttaatctgagttaaaacgagggtggaggtggagctccgtgctactccagcatggaagcatatacgtctgattcgttgcatgaatgactacaatatcgaatccatccataccatgttcctggccaggtacgtcaagtcccaaggttctagattatctggacagtaaaatatgcccaaagcaacatgattggtcagatagcagtgcatatccatggatattccccgaagccacgctatgccagatgtgggcgaacaaatcacaaagttctatcaggaaggccacatgtgcatatgtgaaagtcgcctccactgcctgtcactgttcttgtttcaggaaaaaatcaaaaaggtcaccagctgcacttcgaatcgcattacatcagaagtcatatgagaacccttgaacagtgcaactatccataactcgtttctccacgcgggcagttagtacaatataggaatcatttacaataagcatattttcaatgacgatgctcaaatatatttgcattcgccatattattcgcaagtcgtagattcagccctaaacaagagaaatcccaagtaaaaccggataatggtcggggtaggtccctgtcggaggtatgaggtatgatatcatttcaatctatttgggtggagagttcagccacacaagtcattggctgatatcatcgtgcaaattcaagaaatattgtttcaaagatccatggtattctctaaatggtaggcttgatatcttgtagttgcaatatactatactatattataactcgtgcaacggctactccgtctgtacatgaattctccggttatcaactaccgaaatcaagatttgcctccacacctcttggcgtctgtgcatttttctttttttggatcgatcgactctacggagtacattgaatgacattgtgctaatataccagacgatagcaaggttctggatataaattgcaagatacaagatgttctcatccaaatctgataccctattcttattttgtattctagagtctagaccaaccctccataatataaagaatgcttgtatttgctcatccaatctcaagatcactctatacttgacttccgatcgagatcgatcggtgtctcttcccgctggtacatcctgggcaagactttagtgttcgccaccgactattgcccgaaatggataggataaacagaatgcatggtactctagctacaacaacgtatgttcagaagttaaaataaattgatagttgctcatcatggacgctttattttgtacaaccaaaaataaactcgtagcattaccttggaaggtaactatggctgtgctactagttagttatggctgtgctgataaattatgtaatcagggtctgtggcgggccattttataactagttcgtggttcctcctgagaatgcattagaaaaaccaggatccccgcctcagggctcagatcaatcactgaagaagaagcttccaagattatccgcagaaagaccaccgtaccctcgcagtccgcagtttcattgacttcttcgggaaactgcctcgatccagctcgatattgctacatacgcagtctacacagatgaatacagtcgtcactcaaggctagaaggcttcaccactacatctccgcggaatatactccgtatccgcgaggtattcgtgtctcttggcggctccactccggcccgagctccgctagctaaacagcgaatctaaagtcgaacgttttctttgacgcacttcagactccatatggatcgcagaattatgtgcgatatagttgactatttacgttggcgatgacatacgaggtttgctttttgatactagagaagggagcgacagaagtatgtacgacaatatatattagacttgtgaattgttgaaataaaagatgagtagaactgaaatctccaacaagaaatgcaaagtcttctatgttccttgtaaagctttgaggcttgacatagatcaatgagaaagaaataacaggcagttcatagagacattcttaaatccttcagctaacagacgaggagcaacgtcgagatatcctggatcgcgctagatgtggcaattatttccgtaaccattgtatacgagcgttattttaagttggagaagctgctttaatttcagccactaggccctaattgaggccgttatccaaggcgcttgagacccactgcttgatagacgcggtcagctccggtatattaaacgcatttgattgttcgagctagtatagcttcctcgtatagaattaggctaagcatcgttagcgtcgcctaatctccaccattttaggttccaccagggaccaatgtcaccctgcccaggtacttggctatttcaagcttagcccttgtagtgtcgagatcgtttgaaactgccacacttactcctttcgttttttgttttctttctcatgtaaggttatttgttgtcatccgaattacatattctcacctttccttgtaatgtttgaaaagcggcgaggacatgattcacaagtggttcctctggctcacctgcctgaccgggggtggagtcgaggcattgtcactccaccagcgggacaaaccagcaattgtcaagatcccagttcagcgcgtagagaacgttgccacccggcttcagaaacgaatatctacagtctcggcaccatttgaagttcaggtatggcttccttgctggagtctctacatagaatgactgaccccctttataggaggaaccagaatttgcaagattctttaggagatccaagttcgattggatacaagtagcgggtatctcgcgataaccgcgtccaactcaaactattgtgaatcgacaaacgaagaagcatacttcaacatcagtagcttctcaacgtatcaggtgctcgatcacgatttcaatgcgacatattatcaggaccatattctgacgggagacttctcacacgagaaagtggcgatcaatggagccattatacccgccatggaactaggtgtcaactttggaatcgatggtgacaatgttcttggcctagaaaaccttgtgggccgagaatcagatgcccctgcgaggatcctccaggctttgatgaaaaccggtgacatcaaatcagccgcgtacagtctgtggatggatgactctattggaaccataggaagcattccctttggtggtgtcaacacggcaaagtacgtcggagaacatgcataccatgtctattccagctatcaacggcgtccaccatctccccgtagccctggtgacagggattgcaattcaagccggcggtgcctccaagaacacgacatccgatttacctttctacgtggctctggactcggcggtgtcatggacatatctcccagatggggttatcgaacagatctataaagacttgggtgcttagtattatggcgatgtcgggagactcaactgcaccgtgggacaaaaaggctataatgtgacatttacattcaccgatttcgatattagcatcccagtgagtgatttcatcctggggggtgatggcgaggtatgcattttcagcattgtacccagtggcggacaaaccgcagtgctaggtgctacgtttttgcagagcatctatgtggtctatgatttgtccaacaacgagatatccatagcgccgacaaacttcagttcgggtgaagacaacatcttggcaatcggcagtgggtcgagtgcgatctctgggggcggtgtctgtgtcggtcactgcatgtgccatagtcccaaccactgtcaccgaaccaaatccgatcagattttttccttctacctccgtttcaagtgcccagagtgccacttcgactagcaagggctgggcaatagctccgactggaagtcccaacagagttatggctggtcttattggtgcagggctcctaatcgtgctataatattatccgagaagggtgaatctgtcccagtcagtgattcaattcagggtgattgcgagtggccagatattcagccttgtacccgcaatgctaggtgatgtggtttttgtaatatacgtgagacattaaatgtgagggtaggtggtaagatagcaggacgcttctacattgtcagactctgttatgaatgatttaaattcatctcagtaaggggccgaggtcttatcagcttcctctgccactttcttggtctctaatgcgcctcaaaatataatgttctggggtcagcttgagccgcttatccgatgtcagtgctctacttaataagagaatagaaaagtacacatatcaaggtcatgtgagcgcaccgggtctagacagcgagccgggtaatcactgagtaatcaactagcccgatgaataagagagtctctagtatcctatagagaagatcgcatgatttgtatgagttaggtaaaccaacgaccaagtactatagtacaggagttgggagtaatgagtgcaggatcggtcctcatagggccgtacatgatcacatgacagatttctgggatctcactaggatagcccgtgaatatatcaattcgcaggtagaatgtatcaaggtgaaatctagcagcgaggtgggtcaaaatcaaacccgctcttgtggaagagcccaatcttccgtatggggctcacgccgccgagcgtgagctttcttccgctgccgtctctctggactgagtttcgccattggaattgcagaacatggccaggaaggtatctctatcaagatctccattgacaagcctacttttgtttttgacggacccaccgtgtaaatgatgctctctggtggaagacgaatcgtaagcgcgggcaacgtctccattaaagacctgagcagagtgatcgatgtcggtgtttgtataacagtgcttgatatggctgggagattggatattgtcggtaccatcgaaagaggtgctgttactttggcgatctaggggtggcgagatatgattagcaagggatgagatggttaagtgagcggacagagacaccttgatcatgacccggtggatgacctctgacgaaccccatggagcgaacttgctcatccgaaaaggaaaaggagcgcgtctcaagggaacggtcacgatcctgagtgtaggtggcgagaccccactcactatgacctagtggaagctctagggccgagtgagaggctccatgggcattcaccgaaggatgaggggccgataggtatgcttccatttcccgacttgagggaccggatgcttgagttgggcagatcggcatagcttatagtagcatgagcgactaagggtagtagaagaggaagaccgtgggaaaactaaagtgggcgcgacaagagccggggcagatggctcttaaagagcgtccatgacagggggtaacaatgcagtacgcagatatgccgataacgatctagtcgaatgcaggatgatcagatcacaagtggcggcaggtgcggatggtaatgagggtctgatcgcccaggcgattgggcgaaccaagcataggtattaaacgacggggcggtgaactcaatctgagaggcaatcgttacggggcttgacattagtaccggactgtatagatatcatagcagatgagaagattgacaggggaaagatttacccagtaaagcagacaggaaatttacaaggacagatatatctcgagattctgctgtcggtcgcgactttcttggggagtactgtacatacgagacactctcctcccagcaaccaaagaataaagcgcctgggaaaaagaatagcggacagccaaacacagcaagccactgctgcaattgaacagcctggatgcattagcccgccgtattcgcctacgcgccgaatcattgatcgtaggattgtctagcctccaaatcacttcgcattagcggctcttcgatcccatggaacgcagtgaacgctagttcgccttgcgccctccgttttccggagctatacagtaagcccggagcgatcaagagagtgcctgagaaccatgttgtggatcctggggtcggatatgacttccggaggcgggatctggaatgggcggttaatattcgaaatcggtcactaataatgcgtatatttgaccaagccgtctcctgagcgctcaaatccgagaaacccgcaaagacggccaaattcaggggccacgtattggtcatattttagtcaatttagttatattgttatattccttatattaatagcccattttagggcccacttttcattttgtaaatcagaccccacgttcagttcctagcatcatacccggccctaggatcagatccatggcatggtcccaaggcgcactattagtcgctagtcgctcttaaactacgaccgtgtatattcataaggacgtaacaacgacagccctttcaaaaagggcatagccggcacaccgaggttcgttctccggttcgagtttgataatttcgggtagaggctgaggagctataggtgaagttacgatacgagaatatcggtgaggtattaaaaatttatgatatccagggaatttagagacaatcgatcgaaatatactattcggtataacaaattttattctattactttatatcatctagagcaggaccaattgtattaattactttaggctgccctatcacaatagcatggcgcagaacctaaattaacgctaaaagattgagcgagaaaggcctaaggactgatactatgaggcatagtagagagctgtctcggggccgtcttcgggatgaaaagaggggttatcaggtctctcttggttctcagcggcttttgataggcccgagagacagatacataggacttttgtcatgcgcagtgacgcgaagttaggtactctctttgtcattggctactaatatagttatagttttgcggctgtctacgggaagcacataggaacacgggccagagcggacggcgattccgccttctcgcccggtctatggcgcacttaacttttttttcatctactacctatttcagcttgggctccatataatttttccaggctattccaggtacttacaaccatagtcgtccgcttagacttaagcaacatgggattcggttctagtagggtgtgtgaccaccgacgcatttatattcaatcataagcttgattctccaacgcttcgatgcattccctcgggtgcctatttgtatatgctacgagaacgagtgttccagggggcagcagtccaatcatattaaattgtagcttagctggaaggatcagtgcggcagtcgcgcgacttgggtgagaatcccaaggtgagaatatctttactatgtaactttagctctcggggttccatggccaatcataaactcgaattaaacgccttccatcccaaacatggaattgttaccaccatgctgtactcagattacatcaggcctttttgatgaaaggtttagaatatctcctattagcacaaatatagttgtagttgagtccagacatatgtgatgagtatgaaactgtaagacggtctggataaaccaaagccaaataaacctaatcaatcaagtggttccccggcgggccgtgtcttatgacccactttccaacgcattttcattagctaatatagcatgtccataactaactaactagttagacctcgttctgaccgatcacagcattttagtaggctgtgagtattgagccttggctaagccttgctttgataggaaatttttggacgaataatagttgctcttcatgtcggtcttgatatttcgaatatctggcagaaggggctattttatgagccattcgtttgcgccgaggtaatcaagagcagtactcggatttttcccgctaatattttctatcttgcatcgacttcattttattgcgagatattttgatcatgatccattctctctccagccacagaactccgaaaatcagccaatatgagtaccgagatggacgaacttagcaaatctttcggtgatctttcgctagtacaaacactggaaatgcttgtggagaggacaatcaaacctgcccttgcggtgcaaaaagaaatcgaacggattcttccaaccgatccttatcttgccgggccgagaagcttcgcgaaaaatataacttatcgaaaatgggcttacaaaattttcaaaaactgctctgcggggttcgcacattcccctggatcttgcttcaaaatccaatacatgaccatttggaatacaaggagatggtggcaaaaaccaaaactctactctggctcgaagtacagttgcaaaggcttgaaataaagcttgaagacatcatcatcgtggacttatttccaatgttgaccgttaaatgggtgaaaagtcaccccgatgagcgcaaaaaagcaattgatgaaatttttgcgctcacacttgattttatttacacgttcaagccgccggttatcctttcgtgccaatgtgttaatttccagggggcaaatgtctggccgtcactgaagcatgaggcggctgaaaagctacgatcatcgatacgaggtgccgaaaacaaacgagtatcagagttctcacacaaagaacatgttacccatattgtacatggcttccacccttctgcaatgcgccgtatgccccgcacgatacctggccgagcgacaaggctcgagcgagaagtcttgctgggtcggataatctcttctttattccaaccgtactcagtatggcgaaataattacatgctcgggaaccgccagagtattaagaaacgggctatcaacgtacacctgcgccaaatgaagaatgaacttgaccagatccatgaagagggacttgctatgggcatatcccaggagccagacatctcccccacacttgctgagtggaaagacatcgataatgcgttggatgagatgtcgaatcaactgtcactcaccaaaatctatgtatttatgacttctgagagcgctatcatctagccaaccggactgatccagcacatagtaatgaatgtgctgcttctcagatgaacgtgcgaagaacattggattttcttttattttctttgctattaaaaatatattttttaaaaagaagatatagaaagtactctaagagtatattacatatactatattatatagctttatatataaatttcaaaatgagaaagaagataaggataatactatctactactataagctaatatctataataccagaaaaatataactattgtaatggggaaactgcgccaccattgcatatgcgctactgtcgaaggaatggcatatttattccctgattcctatccatcggctccttcgccggtccttgatatgatccttgttttattatttgccattgtctattgatacattcgagaatattagagggctaacagtggatatattgacactgatagagtagattgcgtaaaagactaagcaaaaagctatggatttcaaaagacgacagaggaaaggggatggcagagccatgatgatatgaatacaggccagcaatagtcaaaactaaatgcatatggcgagaagtcagcaaatgctgttagaggagtacagcggagttatcagcatactctgacagaaaaagcaaagaactatcaaggaagatgcagagaaacggagtgattcagcctgagcttcatcgactcgacgacatctggcatattcaaagctactccgatgcggtttccctcgtggatcacatcagcaaatagtattcctgcaacatctctgtcggcagagatcacgaagctgccagaatcgccatcctccaggaaatcgccatccacacgagtgataacatattcttcggtgatatgggttgccattgatatttcagcgccatcgatttcatatcgtcgccctttccactgacagacgcttttcgcaccattacagatgcccccagtcacctccgtggtacgacctttcttgaagtagtactcatcagtctgtagttcaccaaactgtgtgatagagctgttaggccggggaagaaaggttgcagatccaccagataggagattagtcgacgtgggcctctgcttctgcgggatgtcaggtactatgttcgggcggaagtaccgttgctgggcttcggttgtaagctcgacgaatgcccaatcaaggaaccgtttgccatggaccaatagtcctgatgcaaatctgactttgccgagaacgtatggcatagacttcacaacattttgtgtctggatcagactagcgtcggcgacgtcgaggtcctggagccgctgccgagaggcttctctgggttcttctccggcgagaagccgcagctcaatggtctcttcgatctgagccttctgggatgcgaggctttctctgtggtgctgaatatccgcgagtgtacggtctcggtccatctgggcgatagactcgatgatggttgcattttggtcgtcaggggggaaattggcggaaattccagtgcgatcaacctcatcgcggaagggagtgtgtgctgttggtctcacaacatggtagttagttagaaacccaaaatgggcccggtcgtcatatcttagttcaacaaaaccgcccagagttccaacattctgatcaccgctgattccaattgaatcacccatcgccaccaaatctctgtcatcaaaccgatctctgaatgagatggaaggatcatgtttcaggagattaagggttcccggcagaaactccacgtcaacaagcagagctgacaccttcaatgaaagttgtccgatgatccgggcccggatttcgtaccagttggccatgagtagtggctggacgaaaatcacaattccaggtcgcgccgagcgaatgtcagggccaccgacgttgaacgggcaaatcatttgccagttctcccccactgcagaactcatcgtttccacaatactgtgcttgagcgtgtgaaaggcggaaaccactgcacttgttgaggcaatgggatacagatgaggtggagagaagtggtctccgttgagaacctcgacgtgcacattcgtaagggaattcttatgaagcagcttgacaaggctgtctttgataggccctaagcggatgaaggttgacccatcacccgacaccgtaacgcgcagcaaaaagaaatagctgcctgtaactcgtgctttcagggtgtggtggaaagattctgtgggtatccggtgttgactgaggattgcgtcgatctcaggccgaagatgtcgtgttggattttcttctgcagtgagaaattcggtcttcatttccgagttgtcatgtccgtggaatgtgttgctccgaaaggggtctgtgcgataaaggaactcctccagcctcatttcaccttcattgtcctctgactccctcagaagccgacgcctcttccgcgggcttagcgggcctgaagaggcgggacttggaaactcgcggggcttgtaagtggacattctgatctgaaagaaaacaaatggatgaactgaatatttctgctgatgaagttgggagaggaaaaaaagagaaaagagaaaagagttgagtgggcttccaaggtgaattctagcttttcggaccgctcctcagtagggcgtaggcatgcgtccacaataccgccagatgacatgtagacatgtgagctgtttacccgttcagatgtcggcaacctcccgacattgattatcgtaccttgccgtctcaaatttcaatgacttctgaaatccgccgaggacgagttgccaagtaaggcaaaagtcagcacggacgattgcatgcagaccataacaccaaaccaaaatagaatccacgccttagggtccttaatagtctcttttaattagaccaccgagaaagatttttgtcaccaccgtcccgatcctgcgctatgcgtagagatagcacctgtctcgggcccattcggcatcagaaaaaaagataatgccaccccggctgcaagagttatcccaccatgaataatgaataatacgtgccagagggctatcgtgagtgatgtgttcttgctaatcccgtatatcagacaacagcctagtactcgagccagtccatttattgaaacctataacgcggtttgggcattattttcttgcttgcggtactatatactcgttattgtcataaatgctggggagatagtaccttcgctgggcccgagaagaaaacatacagcagcgaatccgccaaaggtttgaggtgcagccagacatatgtagatgatgccctagacaattctgtgcaagtaaacgctgtcagcatatgaaatgatatgacacgaaggccggatgaaaactcacacggtggtaccgacgaatttgtttgatagaagtcgactcattagataaataaaggggtactcagaaaccagttgcccaacgtagaaaatggagcttgaccatgagtattgcgagctggtcatgttgagatcttcgatcaagccgaagatgccagtataactcagactctacttgttaagatattggaggaaaaagatgaagcatatctatgtttgcctattagctagtgtatggctggaatgaaggacgagaaccaattaccaaaggcagaatgactgtgttaatcttgcgtaaaacgggtttctcttcctcggcagtgtaggagccccggagctcgaccaattcaccggtcattcgatcggactccttatttgcgatatccttgctgaaattgtctattgggataaatacctgacaaaggcggttcagtgcagtgatttcaggtcgattggagaccaaccattcactaaatatatacaaagggatgttttatatcagagacaatccccagatttccccttagctataaaagaggatccttatctccaatcaattcggtaaaagatcaccgtgtggagttggtcgtcagtcccataaagacggcaatctgcctgtcaacttgccgatgtagttagatccgatgatccccgcaatgctcaatcatgtcacctcttttaggaatatttaatctcttgatctcttgaatgaacagtatatcgcaatatctcatatcgcatcaattcatcatggcacagaacctccccagctccgatatcaaaccgtggacccgcccggcacccaagggatacaaattcaccaatgcccatattgttgatgtcgcgtcaggcacaatcatagaaaaccagacacttatcgccacggatgggaaaattacctatctaggccaagaatcatccgcaccaacagaactcgagaccgtggattgtcaaggcaaatatcttagtctaggcctgttcgatgtatatatccatttatatgcaatcttaggtttcagtgacttatctaaagccttcgaaaatctaaataactagttataggcacccacgctaaacaatgcccatagacccagggcgggtatgcccggcttacgtaaggcccatgggcactgcccaccgtaccgcccgtgggcgatgtcgcagtctaaatacttcacttctcctgtagttctagtttgcttgatagagcttggttatacaagtatataatattaattattaatagtcggaagtaataggagttatataaggtataaaccgatttttaagaagcaattgcaaatattgctagtatattaaagcaaagataaatatgtagcatattatagtaaactaatataggcctctcagtatattcatgagcaatcatatccatattaattaaaggaaaaaaatagcagctttattgctgtttacacagaacttatagtcattcattctattaagttccccaattttttctactgtgtgatacttcgtaccattcggtgccataagtatcggtcctgcatgctgttcatgaacaaatgtttaagcagcaatatagtagatgtttatggcacgaatttagccgacagtgtagctagtagagtccagcatgctcactccttgagaacaagggactaggttgaaaatggtatagcttatgttcaaatcagctcgctagtcatcgttttctgcatttgatcgaacaaaaaatccaagagagtaggtgtttcagaacgaatgctacgatccaataacagtcaactgccgctgagctgtgaaagtctgtgcggtggtcgagcgacggcgggtgatccccactcaggttatcaccctgtctatagcgcactcacccttgtcacccccggtcgcgcgactataaagcggcagtcacctgtttctcacccaggcggcacccacccgacttttgaccgcacataagccacacgccggcgggnnnnnnnnnnnnnnnnnnnnnnnnnnnnnnnnnnnnnnnnnnnnnnnnnnnnnnnnnnnnnnnnnnnnnnnnnnnnnnnnnnnnnnnnnnnnnnnnnnnnnnnnnnnnnnnnnnnnnnnnnnnnnnnnnnnnncgccggtgagttagtagttgggtgggtgaccaccagcgaatcctcactgttgtatgtttttgtttttgtttgtttagtatagcaataaatagtatgttcatcttaggccccattgtggaagtctataataaccttctggaaatgaagcttaacgagacataggatatatgacgctatgaccatctaggggcagaggtcacctgacctgatgttgacgatgagatataagccgtcttaccattccaccaacggtagtctatagttctcagccattatatgtttccctccagtgctatatcagacacatacgaccatagggtgtggaaaatagggcttcccgtccgctcagccgtactcaagccacatgttatatacagctaatactcaattcgcccttagtatataagtgttagagcaggtgggcctgacaccaccttgctagaatgggtacgtatctaataagccaacgacttaccaaaaagaccactataacaacccagatggttgttatgtcaggtttctaatttatataccctttttaccccactcttggtgcaccaaaccaatcagacccaatactagatccaccttacacagaggggttctaacaatataataacaggaggcctactagtactataagtataaaaaggccttctaagtgttacgattgacatgtttgcttgtttatttgtttgctgtttgcattgtttgtaaagtagtcagctataataacccctgcctcccactttacaacttgcttcttctttctctctctatcttagttattttgaatagagtactctttcattattataagaagtataaatctttcagtcgcgactttctcggccatcgtgaaatcatccaggcgacctttcgaggctggcagatcctttgggtcaaggagctcggcacccttcttgatgatttcctagtacacagtttcgtgaagccgcgattggatatgatatatggtaaggcttcctcacacgttcacagactagcaatacatacttcaagcttcatgatcaaaggtacattacaaaattgatataaaacatccctttttgatttgagtccaatgagaatatccagatatcttccgtagatgctctattcgacaggcgcaggactctctaagatggcctaaatagccaccaacttagtaatgaaacgtctttaaagctatccagtgttcttgttgtagagtttaattatgtatcgttattgcgatcaactgggataagggggaaattaaaattagcccccctccaaacacgcaagtttgtttgaggaaccccggttggatttcctgtttgtgagttagcgaatatatctcccattccttcggggaaaagcatgttcagcgctatatgataatgtaaccgaacagcgtataattattgcgaaagagctgttttcatcacttggtgtttagagttgcggaaatcgatcggattatgctgactcgcccctgtctcatcgtttttatcaatggtcaataggaatcttatcatggccagggattgttaagaggacaacaggcaagacgactacggccgaggactgttttcggtaattcccccgtcattgatcacataaaccttcgagaatgcaactcaacgggttgggggatagaatatcccaaatgtacatttttttacaccaagattttatgcaattgtgtcttcgatgctagtcaggcttgctggtcgaggttaggctcattctcagtagcaatcactcttccttcccatgctcctcctacgagacttatttaggtcgacgaaatatatggcatctgcctcacccattctaatgggaaggcttctgcttgctcgacaagccagatcgccatacacttcctggtaatcctcagcccagagcctttctgtccaacgtagccagcgcttggtttgccctcgtctccgtcagtaatggcgcccactcgatacacagtccattcgatatctttcccatggctctgaaatgtattcccgatttcaacaaactctttataagctggtcgaccaaaagcccatactaaccccgtcaatgccgctcgtgcaacagagcgctgatcctgttctgcgtacacactcactgtcgtcatcgcaaacacccgcctcacaccacattcccgcatcacgcgtagcagtagggtgtagaaggaagggaacacaccacgatacgtatcgttccatgatttgtatccaggacccgcgggccctagggccgaaattatgacagcttggcctcgtactgcgccccgtaaggtctcttcatccgtgatactgccttcgattacctacttgccgcagcttgattagccgatgctttgaccatgagggagtaagcgtaattacctggactttgggtgcgagatcctgggatagtttcccggcattgcgcacgaacgctgtaacttgatgtccatttgtgatggccttgcgggtgatttgttccccacaagcaccagttgcacccaagatcaaaatcttcatgccgaagactaatacggtcgaagaggctcaagcgtatttgactttttgtaaattggaaattggcatgaaatgtaacataagtggccggaattggtaattgataagtgatggagcaatatattcaaggacgaggtaacgtgctcagacattcatatttatatcccaggcaattttggcggcagcgtagttaggtccactttacacctaccgaagacgggattaatagaagcacggccttaactccggtttggcccgtcttgtcagctacttgttattgttagtaacacccgtatggtattcttaattccttatcataagaactccgattgttacttctggacatacttgaacgggtctcctcttaaagccgccatagactctaatgctgacgtgtaccgggtttatcttaacgccgaattatgaccatcgatatatgtgataaaagaatttcattttttgccgctgtaaaccgcaccggaacttttatcatgtaggtagacatctccgcattcaccaagctgagcagagactggtttacgatttcaaaacgtcgttgagtaaggtatagaccaaggagaggtcaattaagtaattgacagcgctcaacgcccccttttttattttatttacggggctcggcgtatcttaccacagtggaaaggtaaatcagagagcagaaaaggatgtttagggttgctattattagggagaagatagtcaataagccaggggcttcggacagcttgggaagcaacttgcatccattctttctttgtcgggtgaatgcaaatgttcatattgtcacattctccggaacggaaggctcaagatgcgatcacccatatcagcgaacagcattttatgtgagtacctaacactgcaccgaattcattgcgatatgggctttcgcacgtcgtaaattagtaggcgagaatgaaaggttacggacggaaacacttgtggtacccttgatactctgcacgctcctgaaattcttaaggccgtcttaatgccgtcctagaaacccggccgtgacactccgtatccgaaacgatatgacgccgaaacttcctagacatgcggccagggcaagaagcaggcgctggctagctctttagatggttggggattgggttaggatagtgtcctttcccttgtcattgtggccttgtatgacaagtcgagacttttcgtaaggctttcacgacacagcctttacttctcgtaccatccgcgacttgaagatgcgctcgcctccgtggctcgtcgggtcgtacttctcaaagcgaaaaactccttggttaaagaggtcttcgatctccttggcgtccgaagcttcgaatggttcaccaggtgtcgtgatgactctattatttcttagcttgatcgccagttccaaatcgttcacctttttttcttgacaggaaggcggacgcggtcttgttcttggaacctctcgggcgtccacgtcggcggggctgaggggcctcgacgataggtggcggggggtcatgttgactgaccggctccgtggtatcttgcttaggcgcccggtggtagggtttcactgatgtagacctgaaacttgtgggaccgttcaccatatccactataatgtcgtgtccctcaatcgaaacaatcttgcacggaccttgtcatccttcgttctccctccagataaatacttcactctgtaacgggagcgaaagaacctcggaggtagaggggccgtttcgggcatgaagcgcgtcgttaacccgtcgttcagcattggccttccgtagggcggtcatcgctttgttgatggcttcagctcattttgtagtcgaaggtgaaggcggtgattcggtcgtcatcctagggtaagcaccaaagactagcaaggtaggaaccaagccatctggtcccgctgtgttattaacagctttcattgccatttgaagtatagcctcatcacttgtgaatccactgagctctgctgacaggatttcccatgcacgcttgagtggtccatgagacttctcaaccttgccaatggaatggtgggtcaactgatacttattcttaaaacactctgcggcacataaaacggctcgcacaatagactttgtggaacggaaacatctgatacaggcgacaccaccaatcgctcgttccaggccaatagaattatagaaaggacctagatcgtacggtggctgcttgggatacgttcacagcacttgatttgctgagtaagagtccggggatgaatcagatgagcttgaggtcacggagcggagtcccgaagacgctagtactcaccattgcaaaccaccacgcttgaggaagcagagagcctcacccagctattcgaatacaagctgcctgactgggcgctgaggaacgataatcagcaatcgaggttggagtgaggatgacggagaacggggtctgatcttgccacaggaacaggctaggagctcgacgtggaggagcttacgcgggatgcgggaagagaggagatgtgggaggtggatggtacatgcatccacgcactctttgtagacctattgccttatggatatgtgttggagagtgtatcacgcgactgtgaccactccgccccaggacttcctgttagatagtttccatagtctctcgctcttccttttcctctccagagtccatcatcaatacagatgtattgtcatcatttctatcttccggcatcgtagctttctgtccctccgacaatatggcttctctactgtaccttgggttttgtaggttttatgttccgcttacatgtaataggtgctcccactcttcgagaaccaggaatgggatatagagttatgccaagcctgggtacccaccgtggcctgtttgggctttcttagaaggtactaagcctattttggaacgtcgatccggggaaccatctgcctgcacatgttgactggactacactcttccagcctcacttctcacttctcgcttctcacttctttgttcttcctttaaccttgtcttgccactttactcaaggtactcgatccgcaagctcttactttcttctcatttcttccttcagccttaactctccactttccttaagcactcgatctgcaaactcttactttcttcccttttctcaattgagtctccacttctttcacatcgagactttgaaaatgtcctctccaaccaagaagacgaagagcaaacgtggaagtctctccaatgtcttcgaaggacttgacatcaaacccgcctctccctatccacatccgccgtctactagaatcaaccttgccaagtccatccgccactacatgcaatcaactcttcgctttggacaaggaactgtttctcctcgcagtttaagtaaaatgcaatctcggtttacgatttgcatggacgaagcctacgattacaagattggcacacaagacttcgacccggacaccatttttcctgagattatcaccctcggcaatcaactctccgcccttttacaaaagcaactcacacccctgcaagaaagtgagttcgaaaatcacgtcctccattgccttgccactatagtgtacggatccaacatgatcgagcgcgctggaagcggttccaaaatcacactcaagctttgcatggcaatcttccgcggggaggaaataccagaggacattggagaaacggaggaagagttcttagagttaaaaaaagagcttctacgcaagaatatgccagcaaacgtctccgcagttttacgaagtcgccgtgaaatcgttcaacatgccaaggctgcctcgtatatgattagtcaactctgcgtttatgataaagatcttagtgaagagatcatcctccagactcataaaattcttacgcacaaagtcgacgctgaaagcactccctgggaagaatacagtggtgtctatcgtacggatgaagtttctgcgggcctccatccgtttcctcatcacagccttgtgccttacaaaatgaaagcaatggtccgcgaactccagtctgacatgagagaagtcattgctaagggaacgattgaccctatcgccattgcttcgaaatatactcacatctttatcaatattcatcctttcatcgacggcaatggacgtacgtgtcgtctgatcttgaactcgatactccttaagcttggcagttttcttgtatgcatcggcgagaaggaagaggaccgctccctttacatggaagtcgctagcaatggaggggcactggaggatatgtatggagatcttgatgacgaagagagaccagttatgcacagggagctaggaagttttgttatgtcacatgtcaaagagaggatgcgcaagctggtttctatgctttcgtaaagtctcttaggtctgacttcggaatatcaaaaatggagtttatttttctataagttgaggcttggccatctatggatgtagtgtatagactgcctatctcgtatatcaaggtatagagaggctaaaataaacacttgagattaggtggtactcccagagaattacacaccgcaatctgtcgtcagagataactaaagtgtctgaaagtaggttgtagcaccttgcccatatatccaccgttttgccgtcctaggaatatttgttattgtagtaattcaaggaggtgggtgtagcattgcctccttaccaaatcagcaaattgaaatcagaggagtatcttcgcggcctcgcgtattagagaatagacaagacgtgtccctaaagggctgaggcatgcaattacacactacgattctctttttccgaggaagaaagtcatactgtaaaaaaagtaggtgggtgacccgatataaatccgtcccactttgaaccttacagatatggtaagatgacctggcctctcgaatagttatccaagagaaagatctcgctgatttcataaagagctacccccgccgggggacgcatagatcatttataatcagagtaccggacgatatcaacgaacaaccagcgattgaattatcactactatatatgtctgtttgcaagaacgttctttgatcaaaacatggaagaacttgcctatacctaagaataaaccagcactacctttcctatcaagaatacaaagaagaaatcaagcctaatcgaggattctagctaagaagtgccgacttaagtaacaaaaatgaggttctttaatctggatgtataggagggtaataaattacatgggatacttaagtcatcagataaatagattttgacattcgctacgctttgacatccgatgggcgatcggaagccgggcaatacatattccggattgccaagagaggccaagaattagcggtcccattttgatattcgctcagctgacggccgatttatttgtcttggcaatgtttatctgatagatcatcccgtggtatccctagcataccactgaggagcactcgacgttcatatcacaatcaagcctgcggaatcatcgatcaatctatatgaagcgggcacgctcttgctccccagtccctctgcccccgaatcatagaaagatcgttcgtacggtcgctagccttacctctgatgctctccaggagcacgacgattctattcagcccctttctccattggctctatttgatatgtttcctcaacagatcgccagtctgtcggatgttccaatcatacctcctccttccacacgctcctcaacgatcgcgatcgagcagtccgtcccgaccgagtgatgtataatatcgcgccggctatcttcggcgcgcaaatattttcgtagataacgatatacctacaaatatctgttcttatgcagataagaaaatatttcgtgatttgatggacgatgctcatttgcaccagatggccgaaaagctgtggagcaaatccaagaaacttatcaagaaaccatcgggtgaagctgaatggacggaagccttacatacaggctgtgcgtaatcaaggcaagctattatatttctggtggaggaatcccgaattgaactattttagtgctaacttcttagcaagactggcgcgaagacctaaaaccaccagtatataaccctcaacctaccatcccacggaaacgaagtcagtcatatcgccttgtattcgaaatcgccgccagcgatagacactcttcgcatgcagctggatcagggcccccgttgccagctactcctgtgtccaaattgaaaaccccacgtccagatatatgcgttgggttgtcagatgagagcttggttaatgacctcgagcctaagaagggccgcagtgccgctagaagctttctactagacttgcaagataccactagtcttgtcagcgatccacacgtcacccctttgggccttcgtttcccatttttgatagtcgaggcaaaggctggttcgactggaggtaacctctaccaggcacagaaccaagctgcggtaggtggctcaacagctcttctgattttgcgaaacctttcggagctgaagtctgctcaaagtttggattgcaagagtcaaggaagttctcaggccagtattaggccaattgagagcttacccaacctcatatctcatatggtcttttctgttactacggagggcccaatttatgaactgtggcttcattttcagagactaagcgaagaaaacttctctatggtttgcatcggggcctggaggacgaccgtgaaagacgacactctgaatctcttacgctacctttgggcagttttgagatggggaaatggtgaactcagagatagcattgtgaatgctctcggggccttatagaatgagtacacaagtcagtagccaattcgcttttgtcaaccaatttgatgcatcatgacgataatatccccttttagcaattcaaaaattccatagcgaaagccatttgaatgaaaggtacatacgcgctcgaaatcagtttcacctccttactctcttccactctttcttgaacgcatgcctttggttacccctgacccacacagaccccaagtgttatgatcgcaagagggttttccttggatggtctgcagtgtacactctggcgtatggtgattctccattgcgtagcctgcgtagttcctgtggagtttaagtggtatgtgatatttgcaccgggatgtatgtgtaagcatgggcaaatcagaagggctgtagcgagtctacagggcgacaaaaccacaacaactaatcgaactgaagacatactagtatctcttttggggctgtgtgcagatgccaaggatcgaaacgtttcaggttcaacttgtaatccaatcatatcacgctctgtgtcactaggaggtcagtgcgggcgtcacgctatctagggtgattctcacccaccttggattcctgaaactcccgacatttgccagtcttccatttgccggagaaagtacgggggaaggagatctcgtcgccacttttcttcttcattggagaatccctgacctaaatcccccgagttgcataccatcggacccgtctcccgtggagcgaatggcagccaagcaggtgcgagcacaccaggcaacctattatgaccgaaatcttcggcaggtagcgcctgggcaatgcttcaacgcggcgattgaggatggtacaaacataatttttttgacgtttggtgacgacatggctgtatgtgaggagacggtgaattcaatcgcacgagcactccaagtcggccacgattctgatcgtgactggccgtcaaaacgtcggtaggaattgagtataaatgtgaattgctattaggatccaaagatctggaattttgtcttatatagattacggccagtagacttgcggcctctgtggttactcagctagatgggcacgaagtcaatggatcgaaagctttggcagacctgggcattttcttgctaagtgtctcaatcgtctcaaaatttttaattggccctccagtcataaagtccgaccctaaggagtacaccatcggctgggtatgcgcggtcagtacggaacttacaatggcgaaaagttttcttgacgaagagcaccaatgaccagatcctctttcgcccgcggacaataataactacaattgtgacaggatgggaaagcacacggatattgttgccgtctgatccaatggggaaaacggtgtatcttcagcagcaagtgtcgcgagaaacatgttgcataatttcctaactttacagtaggatcggcctgatagtgggcatcggttgtgctgcaccaagttcaaaacacgatgttcgcttgagtgctgcaaagcgaccctttgcgactgggcagcgggggcgatcagcggtgactctgtatttgtggcctttgttgaatatcctacgccaaaaaaaccaagcgatgtattcgcctttctgcacagtgaaacgaccatgatcgatctgagtagcgaccccgggttccgcagtcatctcccgcgcgaaagtgacgcaatcaggaatcaggagcaatttcgattcatgtgagtccagtaagccattctcagtatgcttagctctaggcagacgaccattggtctgtttctgcggcagagttttgagcagcacttctaaacccgataagttacctttttcttgcccagatgatcaagatgcaaccagcgaccccacttgagctatcttccggattgcggagagcccccaccccctcccacatcgccccgctcagattctgggtggcaaatatggaccccggcgccgacctcttaagtctaatcaaatcactcggcccgggtgataaccatctttacatgccaaaagggttggcggaaagcccaaggcaaagctaattaaaagggacgattgggcagagatcagcatcgtgtctcgcattgtctcaaattcgggtgcaaaacgatcgagtcaattacaaagctacagcaccttccgtgctttcctttcttcatccctatctggctttctgttgacacccataaagcaagaaggcacgatgtcaccgtcccagaatgcaacaggtgtttttgggcagctcgcacgtgtcttagcgccagacaagcctcttaacgtgctgatcacgggtacgtagacgtccgaagacaatcggtgtgcgataattcagccagccattagcacccggatgtaggattgtgatgtaattggacgtagagcatgaatgcgttcgaacttgaatgacgcaaacacctcttaccgaaatttctcatgtcgcgctcataactcatactcgaaaaaaggtatataaatacccgaatctaccccttaaatgaatcttcttctacactcctcgctggcaatctactaaaacttgactctttaaaaactacactatggcaaaggttgggttttcgtgaattctgaaagtttcttttcattctaatcaatgcttgtttttcttatagtcagtaattatcatgtttgaggacccggactcgtgggaaaatgagagagaaaatgttgataggtaggcggaaagtccaacttgggatttcttgtttgctatggtgcggctgacacgtacatcaagcattttggacaaatacactggaacctcaggatatccttccaccagatctttgccccctattattgtcggtgcagagtgagtttgtccttcgtgttttgaaagaactatctaacgtagacaatgcagactcggtgaagaggccgtcgaggagttgaggagcctgagtggagtactggtgcggtgtccggatgaagaggaagattagttattgacgctcacttggctgcaacatggcaggccgatctttgtactaagatcgaacaccagaaaataaagatgccaatatcccgcttacgtagctcagggagtatttttttatcttttttatttcaattaaagtgattagtcatgacatctttgtgcctttcgttttaggctaggaaaccagcggcttcggacggttcgcttgggaaatacattaatatgacgaacgaccacctactatggttgataaagacctgatgatacggccatcgtggcatcaatgagcgattgtactaagcacaaactgggatagctgtgaacgtgatgcctattgaacgatgtcagaaaactgatgctcacagatttgcaaaatgaaagatattttcccaaataaggggaggcttctctaaagttcaaggattctagaatgatagtcaaaggaatcacaaaagtagtggttcgtatctactttcagtctttatttctatcttatttatataccattttatagtttgttgtgtcaatcatatcatatctcacagtctttccattctatgccttgatagcattattaaataagcatcaaatcaccattccagctgtaagctgtggaaattaatatacccccatgatatcatcacaatttccagctctttatgctctctcaataagtgctcggatttcttcgagatcaaacggagcaagatctacctcatcgccgccctgatagagaaccgtcaagggcatctcatctggactatgctggggatgaataaatccactatccacaatgacaaaatcaacctcctccccacgattttcatccgcctcgaagaacatagacataaattgcgactctagctccatccaaggagcccagtaatgcacaaccaccgactttgggctcttctgaattgcttcgaaaacttcaccagggctaaaagaagaattgagggttagtcgtataaggagagagttgaggaaagaagctggcgtactcttgcaggatttggactggcattttgagagtattaggcttgggcttggggctttgaattaaatcagattgagtcttgtgatttgggagaggggcgtaaggcttaacttatagacagacctgggcggcccagcgtccgttcccagcttagattttcagctgagctaaacgaaagatctgatcttccttctctacgtcatcaatgaaaattgtaacttgctgagatatcgacgaatttgatttcgaataactctggagtacgaaagtgctacacgggcagaaggtttgatcagcagtgttgacgatcttggcaagaattccctaaccaccccctaactacctgattgggaggcctgcagcatctagaaggggcacagctgcatgtgaaccatgaattcattggacggacgacccacagtttgtttgtcctagcggcgttcggctctcccgaggagatagtgatcgttctacccgagcgaatccgctgagttctgcagtgcataacgtagatataaaccgcacatcattccaagatatccgcatttcagctgaaattctggtcgccactttctttcaactcgaaccagcaatttttccgaagagacttagctcttgactaccgcacaaacaacaacttcgtgttcaacgttacctagttcctactcacaatatctgttcaagtcacttataatccagactttagccaaaactttccgattaactagttcagggctatctcgttaaacccatcttcactaagaggaccccggaaattgcacttccgctttctttattttttaggcatgggcaaacccatactttgccgaaatgccctttacctcaaactatttagatttttgattctttggtcgcattcacttcgtgaaactccgccctcaaaaaattggctagtgtggaaagtgggcttaagacatttggaatatcgagaaaggatcgtcggttaggcaaactccgagtttacagagtttatatcctcggccaacccttcacctttaggacaaactaaaatactatactcattctattcacagaattgaatatataaataacatggcggtgtcgcactagtaacaagtccactcactagaggtctccatgtacagcatatacatctttcctcaaaccttgacggcgatggttaatgtatctgatagtcatgaagccgtttacgaggctacttccgcccagctacgctcttccctcaaccaacccgccttaagtggccctcaaaatgcccccgcactgcgtctaacgaaccctcgtctagcgcggctggctccttgatcacggttagccggtggcgcgcccagagctgatcgttaggcgtaggattcgggttttctaagctgtactcgtggagatcttcgtagactcccgccttaatccacgaagtgaggatttcgattgctttgtggaaggggttcggagcagtaggttgtgcggtagacgacccagccccaggtctcttcgcgcatgtcctggagcatgcgactggaggtgcggttgaagtcgatagaccttatggtcgcttcgtcgagtcgaggcggtctaaacatgatggataattgttcaagagatttgtattaggaagagagagatcgagggtgtatgtgtttgagaaagatctggcagaatgagttaacagagcagaaaacactctagccgctgatatctcagtccaagacgctatttactaccgtgagtggcgttccttggttccaacgccccccacccgaagcactttgatgaagccttcgatactaggtagccataggcgttcagcaccgagacgtctaccccagaaacatgctccttgttcgtggaaacctagataggatggtttggattgacttcgtcatcgcaacaaccttcaccaactttggacctgaacagctggcctattgtcagcacgaaattgcgctcatagagggacttggggaattactggtaagggctccgttgctgcccatgttagaagtattcggcgtgttaactgacgaatgtagagagaggaccaagctgagggactcccaccgaatacaaaattatattgagggctttataggcattcagtggttccgacacttctttatggcagctatgcggttcttgtaacagagatagatcggccgttggggattgtctaatgtcattatgagtgatgcaggtcatgtaacacgccaggtacttctagtaaagtgctgtcctgacttgagcagtgcaatttttccaacccaactgtgctcaccagtttcctttgactccggcctctaatcatatttactcgtaaagggatcatcatgcccttgggacgattagtgggtctcgactctcaatccgttccttcccgccggtccgggccgaacctaccacataccttaagcttaaagtaggggatgagccccaaattgggttacaaacaatgtaaacactctaattatgtatataatcctgcttggtttgcaggttcgtgaacaccaagaccctgatttatgcaaaaaccgggtcaaactgggtccagactgctttttgacgagggcattcattggaatttccatcaaaaggggactgaaaatacggcatctgtcaaaataatccatgagaattgccagtggctaagatgctaagagaaatatgtaatcacaacatccgtcaaatagaatggttaatccctggaattgaaattgacgctgcctgtcataggatagcgttgacagagaggtatcaaatggcccgcatgatccttccccgtcgctctcaacaatttaaaaagccacaatcatgacttagtccactgtctgatgaatgcagagcacgtcgacagcaacctgttctggttacgtacatcccagaaaatagccgcagtgccgccaatgagcatgactattgtaatctgcttcgggaaaatgccacgactgtgcttcttagcagatttcgtcggctctgcatccatcgcaggtaatggaagatattccaaataaggccctcccctcgagaaactagcatacagcttagccttaatcctgtcactaacccagggaacgatgtgacgggccgcaaatttgagaacccaggtatcttgggcttcatagcgcgtaatctgaccggacagatcaacgaccgtttttgctcgaggcttctgaccagcgatatattgattgaaaacctcggtcaactgctgaagggatggcatggggttgtccttgagtaaaggcacgagaccgttggtcaaacgagcaataccttcataagccaggttaccacctaaaccaggattgattgtagcctgccgaattaagaaattagttaaatgattgaagttcggcgggagatcccaaaccttatgaactgagtcacccatcagaacgacccggttgtgactccactgtttgatgacaccttcctccaatggtaccattgtgcccttgactctagcatcccaaagatctttcacggtatactcagggcccactatagaactgccatatttcaggattgttgcctctgcgtcttcatccgtgaatcgcgggcagttgggggttctcgtgcatttggagtctttgacaaaaagaaaccaaaaaacaagcccaggcacaccagcagctgcaattgctgagtagttatcgtaatacacgttgtggaccatcgcatcaggtaggaactgcttcccagcatcgttccgggagacagcaaagatgcagtcgtactcgcttgtaaaggctatattccagagactgtcagttagaatgggtttgggagtagcaaaacagataggctggactaaccctcgttgatttcattagcaagagcctgatcagtcacgctgattttgtcggccatcagctttctcactttgctatgaattccgtccgcgccgatcaggatgtgaccgtggtgctgcgtgccatcttcggtggtgacgataaccgtctgtggggtttcttcatacccaacgacagcagttcgagcatggagcttcgatttgtcttgaacatggttgtacagcacttccaatgctttgcatcgctccatgaagacaatgggacgttgaagactatgccccacaaagtcatggtattagcacatttctttcatcggccacttccatcaatcaatacggcaagtagtaaactatatatagacctacatttcattgatgtcgactagaacaagtgagtcctcaaagcaatggccgtttccatcataatgttttcgaacttgcagaggtataacctgtttctcaatatcctcccatactcctagctgctctagaattcttatggtatgcggatggattccgatagaggcgcccagttgtgttgcaaagtctcctttttcaaaaagctcatattcgattccggcgcgctcaaaagctagggctaggccgagacccacaagactcccaccagctatgaggaccttgaactgatttttgtcttgatcgaacgatgccatgagtagagatgcttagatgcaggagtgacaaataattacggcggaatattttgtgaatttgagttgcatagttataaataatatgtaggttgtccggagtaaacaacccctttatatttcccattccgaagggttattgtgcaaaaggtggagaagaagattcaatgggcgcacctaagaggtccgtgcaatcgtctatactaaaagtagtattcggtaactacgaattctagattttaccaaggcgaattgtgtgcttggtgaaacagattgatcccgtaaacgtgggcaggtggggttgcaaaggcgatgaatattcacagcccgggtttccgaatatacatatgccggtgcaaggtaagggaatgcgccgctagtccggtacattatttgttgcgagttaaagacaatcctattgtgcactctggtcattggattctgcttctaggtacatcatataggcagttgttctcttgatttttccgggaacttccgaaactgacaagcagcgctaacgactagctccaattactcacgtatcatgtagtgacccgctccattaaaggggggccgttgcaaaatggtgcactgttgtagatgatctggaatttttgatcttagtctgttgttactaccttaactgatggttactctgtgcactcgtcactctatggcttagaccaaaatcacttatgatgcagctattcagatacctcattctcaccgttaggatgtatctagacacggccccacattccatcccaccggtctaacggctatactcaacttggaggaatgaggcttgacaaggttcgtcggaaattattcaggatgcacaagtaaagttaattgtcagctcactagttgactattgtctagaatgagttaacaatagaattagaatttattgatctgcatatgcagcctgacagctccgtagtgcgcaaaagtaccagaagtttggaagaaaccagtcacatataggctttctcttttttccagctcacaaaacatgccttgcccggttttgactcggattcgcgtcgtctggctcttgaaatgttgaccgaacccatatgcaaagaggccttcaacttttctaatagctaccatgtctgcctctgtcgagccaattttgacagcagaagagcggcacctgcagtcgctcatctacggtctaatcattagcacgggaatcctgtctatgatagtctgcagcttacgagtaaggacctactggctcgtcaaacgcgagaacctgtagagtacggcacatgagctgattttgcctctagctttacacaagagcattcgtcatcaaaaattttgggatggatgatatcgctgtctgcgtggcattggtatgtccaaccttccattacagctatacaacagccatgacgactaacagtcttaattcttaggttatcacgcaggcctttaatgggctgggagttgctgtggtatattacggagaaggaatacattttaacaaggtgtctgctgaaaatcgagcaatctggctcaaggtatgattcaaacaaatcattcgctcccaaacatgttaacctgggtaatagctttattatgtggcaatgtgcctgtacctctacgcctccttatctgtcaaagtcagcttgctgctatttctacgacggatcttcatcaaacgtgagtctttcattacacaaaatccaagctaggatgacctggtgctgactccacgtccaggctggatgaatgctctcactataggcatgattgtcttccaagtcttgttctcggtctcgggttcattcgttctagccttccaatgtgaccctgtaaggtaaaggaatcccctctcaggatatctgaaagacatactaacaagagtaggggtgcctatgacttaacagtcgcgaatccgaaatgctactcgcagtacaaactctttcagatcacattataccaggccgttcttatcttcgtttgcgatgtcatcatcctgattgcgccactggttattctatgcggactacagatgcccacacggaaaatcatcgctttgatggcaatcttcggatcaggttcgcacacaccccgttatatctgggccggtaaatgctaactctgactgcaggtataatcgcctgtatctcccccgttgttcgcttcagcacattggattatctgcgccatggcactacggatctgacctgtgagtgcacgctccttccaaatctggctctttactcgctgtatgtctgacgctgaccattacccacagacgactcggcatcatcactatactggatggccattgagttcaatttgggccttgtcgcaggctctctttcttctctaagggcattgtctgtttttcgccgattcggctcgagcgcaaactcgcgagacaagggatcgaccggcaataaatctcacgagcttctcaatatgaatggtagtgagcccagaaataccagggaaaggaagagagggttggggatggggacaacaatactgcaggatagtgttaacgagagccaggagcacattatatatgagccgaaaaatgaccacggacagcgagaggcaaggttttgatcttaattaaaaattcgacgcattttaaaatcaatatgctattttggatctttggtgcttgttaatatttcgtgacagatgaccttcctcttttctcgaccgtgccagagacggtttgggtatcaccttatagccgtatggctgttctagagcgtatacggagacagattgtgcaatatgatagatccaaatctacaaaacaatccagttaacattcactggcttacgcctgggcagatattccccatcttccaccaaggtcagcaaatggagattcccgattttgatcatcttctccggctgcgaagagtgcccactaccagcggccatcagcaacaaaccgtgccattgtccgggtcggtaccggagatgaatagcatagtacgtcccatgcactccgtagatctccgggatgagctgtttaatccagtaccggagatccccatgatacatgctcccttggggttggaagtgctcccgttcaacaatatgttcaggcaccgacagactcaaatcgacaaagcatgtcatgtgcttgatatcgccatactcgctatcggatgagaagaggatctctacctccggtaggaacaccgccccgtcgccgcgaacctcccacgtcgatacggacggatggtccgccatctccaagcgcggcacatacaggcgtcgcgcctcggagatccgggcccggaaggggagcatagtgccccggactgtgtcctgagttttcacatcgtcgacggacgggtaatccgccagaacggcggtgatgaagaagctagagcccagattgcgcgcgacctcctgcacgaaggcgagtgggtactggtcgaagacgaagcccggtttgttgggctggcgctgctccggcatggcagtggcggaggtataccattcggtcatgccgaggacggacatgatcgcctgcgcacggctgtggctacagtaacggctggtcgctaagaagaggatctgctcgcgcttgagctcgtggaggttgttcattcctgtgcggtggaggaggtcgagtacttcgtggtatcctgggtgaacaagtggcttccagcgttcgagaaggtggtctgctggggtagttagatcgttaagtaccctaatgagtgtgtccttgactcgtccggcgagggagacgagcgtgttgaaggcgacgagggccccgttgtcgcctatcgtgaggagttcgaggttcttgttgcagatccagatgtcagggcgcagacacacttcctgcagcgtccacagggagctgaaccagggcagggtggtcatgtccagtgagaacagccccgtggcccggatctggtcgtgcgctttccacggcgggatacgtatgggagactcgtccccacttgagaactggaggtccagatatacggaggacatccactggatagcgctgcgcatgccgtcccaggactccggggcggaatcggtattccaccaggcgatggcgtgtttagcgctcttgaagatggatgcctggcacgcaacctccatgtacatggcctgccgaagctcctcgtcaagctcctccccacagccctcctgcggaatgcacaccagatcaaaccagatatagggtgtatccgtgggaatctgcgccaggatatctggtagtcgctcgacatcaaacagtgagttccgagggatcagccacggcacgtgcggtttcatgtcaaccccaggctgatcacgctgccgccaccggccccaggtgtgactgatggctgtgtatgggatctcgaaatcgtattcgtcccacagcgaaaggacctccacggtcctccgctctttcacatcccacaagtaaagcgggaacccgcagatctctcccagccaggggcaggagtcgatactggagccggcgctgcagcgaggatccttcccaggtagatcgctgctccccagaacccgtctccctgcgcgccagaccggggaactctccgaccggtgagcgagataactccccccatctggggagtatggcacttgagctggctgttgggtgtggcttcgcggagagcaagcttcaatcgcaatggttagacaagcagcttcctgcgccatgtcccgccggaggctcaccaactcgttgccgcttcggtgtattacgaagttcccgaattcagcgttgaacagcgttgacatgcactggttgtaaacgcagttgaagcggaatttgtaccggatcccactggcctggtggatcgtctcgcgctctacatggttttgtgagtagaagtgagactcgtcgtcgccaaagaggtcgtcgtcattatcatcgtattctgcttctgcttcatccacaatacatattcgggaacatgttgcccaccatttccagagaatgtaaaacgatcgtacctgccccggggtaagatgttgtcgcagttcttcagcacgatcatcattaaaccccgtgatgaccgtgccgtcggggctttttatactgtcgactgcgccctgctccagagctagtcgatacatgatcgagaaacacctgctatacccgtctcccatgcccatgtcctcgccgtagaccacctgcatcaacgtggcgaggggatatcccttgtccctctcggggctgcgcacgggcacccagtcatcggggctcatgctgttatgctgaattttctgtctaatacaagtgtagataatagcaagacgctggtagtagtgtttattcgtaaagacgagcgacgaggtcagaagcggggttataatagaaaactaagcgaacccactgttctgctattggctgtgcttctgctagtacgagatcaaatttattgatgcagatggaacgaatataagaaagaaaaaaaaggctaattctcagttgcactcgagacatcactccagccaaaccaacgactaccggctcaccaagcgctccaagcaatccctcccctcctgatgccgcgcgtgatatgtcgcaataagactaactttcaccgtctcagccccatgtctcttctccccaaaaagaatcgccggccgatccgccagataatcagcgaccttagattccgtgttcgtgttccgtccaaacgacgtgtagcggacgatatgcatcgtcaggacaatgtatatctggtagcaggtccacgcgtactgaaccagcggcggcatccagagagtcgaggccagcaatcctagcggaaatagagcagcgaaaagcgctataatgctcagctggagaatctcccggggtcggttccggactgggtggccgtagtgtcggaagaactgctgcacgagggctgggagacctgtgaatagcatgaggtcgccgccctgagattggggggactgcaggacgaaatcacgaggtggttcagcttcggtggtcggcgtggttgatggcgatgaggtggaggatgagacaggggtgaggggctcgtggtcgagggcgaagaaggcgctcaggaggcggagcagcagcggggctagccaaatgagacaccagagtgatcggccgatggcgtagacgacggcaaagagaatgatgccggagagctccgcgattaagatgctgaggtaaacgtgccagcctggtcggccgcagttctcgcgcacaaaagccatctgcgaggctttatcttctgccgttgctggagtgaagatgaggtggtagacggcgactttcgctcgtaaggggatgcggccattgtcggtgggcgggaggatacgcttctcgatggcagcgtccgtggctggaggggatagtcctgccagtgatccaggtttttcggcgggtataggcatgtaatgaagagctcgcgcccacatgcagttacgagctgcgcggggctcggaagtagctgtaccgcaaatggtgtaggtccagtctgtttgctcaaagaacgaagtgcccagcatgtggccttcgtgggcgcccttcaagagacctcgggcgttggcgatatcgaaggtgctcagagcggctttgtgcaaaggaccccccatgggcatcagaagagccagggttgggatggatcgaagtgtgatgtgggagaatgatcgctggggccataataaggacgaaaaccagatttcggtggctgcctctgctccgatataaccaagcaccgcaccaaaagcgccaagaaccccaccttggtcggacatatcgccaagcgagatgatttctggtagcaaagggttgtggtcagatagaactcacttcttttgtccagatggccggacctgtcatggcaatggacagatctgatgacatggccgagttttgagttggccggagacctgctgagctggctagttgagtcggtcagcgttgtcacgctgatctaggcttacatgatattcagccgcaagatggggttgtccaaaaacccagctggccaagggttattccattatggctatattgttttggaagtgttcatgtggaatccgtcttccgatttatcatgtcccttgaatcggggaatgacagtaaatcagtcaacatcatccatgggtgccggtttggttcgggtccaaaagctttccaagacgggattaacactacctagcaggaaggccacttcatagcttaagtcccaagcgagctgggcgaattgatacctgtcagaatcctatgccttcgaaccagattatcaactattcctaatattgcagggtctccagagtaggatgactaagcagtcatgtgataactataaaagcactccggaggcatagatagtaacgcagacacctttccaccttttcattctcagtaccttatggtgttctactctctagcaccctaatactcccagtgacgactctactctcacacctgttttgcacgcagggctgtcctgtccccgtgacagggtcccctctttactatactagggccaaaggtcacctgacccaatggtgacaataagaaataaaccgtcttgccatcccaccacggctatagttcataatcctcagttgcactatcttcccctctgttgccaatcaggtacatacgaccatagggtgtggaaaacagggcttcccgtccgctcagccgtacttaagccacacgccggtgagttagtagttgggtgggtgaccaccagcgaatcctcactgttgtatgttttttttttttttatttgttggcatatgtgtgaagtacagcaatagcatgctcatcttgggtcctgctgtggccctctgtacggagttatctttaagaaatcacgtattttaccaccgcggggtatcaatgactaaaagccgagctcttgtaatatgggtgtagacaagaaatgaagatccgatgtctttctgtatgataaatctcatttacaaagtaattaatgctgtctttaaaagcaacaagcattgttacatagtggtcacatatttcctcggaagaaacgaatttattggtccatttctagtggcaagtggggctattgcctcaatcctcaggcgcctaccttccgttttcgggtagcggccgttcgaagtacaacgactgccaatatgatattttggtttccatatcttttgtgagagaaatgagaggggagaagagtgtgcgcatgaaaataatttactcatcgttgattgggggataaaaagagtgtggagaagaggaaacgaaatgaagaggtaaagccacgatgttttgggaaaggagaaaaccaaaaagatgacagttaacgcggaaaatgaataatggagatggaattgaagtgaaagggaagaaaagcgaagaaaggaatagcctcaaagatcatgagaattggatttggggggggggaaagaggtgggaacaacttcaaatcctgttgaggaatgaagaggaaggtcacggggaaagcgcaagaaacttggaaatagcttcaaccgtgagccataggattgggaattgatgtgggagttacctcagaaaggcagggatagcctcaagaatgggaaatagacacaattacatcggaactctgaatagcttcatgattacccaactgagaagaacaagattcagccaatcaaataactagaaagattcaaaaaggctctgttatgatgaacaggccgggcagttatttcaccccaagccccacgtagctcagtggaatatgaccgttggtgcagtctctgggcccaaggctgtaccttccgttgaccgccagaacctgtgagagcgtgcgttcgagccagggcgagttctcaaagaaaaaaggaatcctaacaggtgttggcccgcctggtcccttcgtttggggtaggaccgagtcgagattcgctaacaacgcacgtgtatatatcccgttaagcggttggtttagacgagtagatctgcctatcacttgtgacacaaaattggggaaggccaccattttttttctcttttttaaggaagcaaatgaagttgtattgattctctcgcgaacccacagacccgcttccccggattttgtaatctccccccgtgtaccaacgaatcgtgccactacgacaatgggactttttctctaaaccatctcttactaataataagctgttccaacctggttccaagacctttggccgctctgccccttcgcagtacgtgtgaacatctaccttcatccatgttagcccgcgactttggtaacccctgtcgatcccctgccactacccttccgttttcgggtagcggccgttcgaagtacaacgactgccaatatgatattttggtttccatatcttttgtgagagaaatgagaggggagaagagtgtgcgcatgaaaataatttactcatcgttgattgggggataaaaagagtgtggagaagaggaaacgaaatgaagaggtaaagccacgatgttttgggaaaggagaaaaccaaaaagatgacagttaacgcggaaaatgaataatggagatggaattgaagtgaaagggaagaaaagcgaagaaaggaatagcctcaaagatcatgagaattggatttggggggggggaaagaggtgggaacaacttcaaatcctgttgaggaatgaagaggaaggtcacggggaaagcgcaagaaacttggaaatagcttcaaccgtgagccataggattgggaattgatgtgggagttacctcagaaaggcagggatagcctcaagaatgggaaatagacacaattacatcggaactctgaatagcttcatgattacccaactgagaagaacaagattcagccaatcaaataactagaaagattcaaaaaggctctgttatgatgaacaggccgggcagttatttcaccccaagccccacttagctcagtggaatatgaccgttggtgcagtctctaggcccaaggctgtaccttccgttgaccgccagaacttgagagagcgtgcgttcgagccagggcgagttctcaaagaacaaaggaatcctaacaggtgttggcccgcctggtcccttcgtttggggtaggaccgagtcgagattcgctaacaacgcacgtgtatatatcccgttaagcggttggtttggacgagtagatctgcctatcactcgtgacacaaaattggggaaggccaccattttttttcttttttagagaagaaaatgaagttgtattgattctatcgtaaacccacagacccgcttccccagatttaaattcccccactgcacaaagtttccgaattattatgcttaacaagagcctcaatgtcctcgtttatcttattatagccaaaagccagtatatatatctttctcttcaatcccaatgacaaccaagtcccttccggtaccataaccgaggacaagagtggctttgactttaggtatcttttatacggaccttgcatacaaaatgtacttgcttccttgtccgaaatacctgttttaaaaaaagtaccagttaaaagccagcttaatagaaaatattcaccttgatttgttctggatgaccaacatttcctttgttgactgtgtatttattgtattgttgaaatgagtatacatacccaaggcagaccgatttgggaaggaacgctgtagagagcacctggcccacgtgaattgtgctctctctttcctcttcctcttcctctctccctgatcatctttgtcttttgtccccagcttcaaatcaacgagacatcagatctgccctctcgttgcaaaataactctcctgtcccctgtacattttccgtcctcattgaggttcgaattgtatctcggctgtttccctcctgtctcccaagcatcaccatcccgacttacgtcgccttttacggcctcagtgaggatcgttatctcattttcggttgataacagtaaggtctcttggcacgtttatcctcactgtttggtttactgaatattgaaatagaaatgacatccgctcccaacgtcccggatttctttcgccgtcctcttggagctgattagcccaaggagttgcataaacaactcaaaaaaaaccgccattgcatgattagcattagagaaaacaacgaatacatccctgccgcattgagaattcgctttaactcccagcaaccatggctagattttcaaattgacaaggcgcacgtcgttttccccgccacatggacagacatgaagttggtcctcaagggtacctccattcagtacgataccttcattcatacacgccagcagtctgcaatagaagggaagaaagattatcaagcgtgcttttttgagttaagcccgtctgctagtcctgtattcgctggtcctttctgggagttaaaccacgaccaatcagtgcgatagagcaaactccaggacattgagtggcccggaaagaaagtttatatctcgattgcatttccaaacaactgctttaatgaattctagaatatacaggcctacatggccaagctggtagagcttgtgcgcagaaatcttcacacagacggcaaactacgttcgttttggtacgctgaacagaaccctcttccagaaggggaaaaagcaccacgcaggcccaagatgccctagctcttcgataatgatagccaataccatgcgtgggacacctctgtcgacttctacctggatgatcaggaccgccgttcgcgactactggaagccgcaatcgtagaacaacatattgagtgatctatctacaatgatgttttctgtaagggcaagactcacgatgtcatattcgagcgtgttgggccaagggagattcactggaaactccatgtctggatgtataccaatcaaaaagctagccccacctgaagccacccgagtggagtataaggtcgacatctcaagtccgattcatcgaaaaaaccaaaagctggtcactggcgacggactttgcatacgctctagccgtgcagacttcgctatcttgactcgagcgcacttcgaccctgctttagacggccagaccaggaagattatggctactgtcacaataaatttgaatggagtgggtcggcaaggagaccgtggaaaggcctcctcctggtatggactgtaagctcctgagccctcggttatatgttcttgatgaatttgaggccatcgagtagtcatctgcgcgattaattggtccgtctcttgtgtcttctggatctcggaagtcggttcgggacgatctatcccaaaacgttccaaattatcttcacggcgaagggattcctctcgagtcacttgtttttcagattcttctatatgatgggatggcggaccattcgcaaggtgtagcttacacctcaggccaaaggggtggcacgacatagtaggttcggcccgggccgacgggaaagagaatgcgcatctagacccactaatctgaaattttggtaccgccttccagattgggtgtgaccatggactttgccatgatttctgccttcttctggcttacatagtgaataaatatccaatttgatcagaaaaaaaaaacacatattctccctggttcagatgtttcgaagtgcacgctgactctctgggcctgtgtaaggatgggctttcaatgcgtttcaccggtcttcaaagtgagcgagtagtattccagtccttccagtccacgagtactcccattcattattctgagcactaaaggtgaagtgctcgatttgctagactgaagagagtctagcgatggacttatagcgctagatagaacttggaatattgtgcttgcgaataccaagccacatccagccggtactctgtgatataccccaggcattagaagtaccttgatttaaattcttcttcggtaccagcagccgtaacggcattactgttcagctcaggagtaatgacccatcttctagagtagcaagcagtagtaaccagggtgaaaggggcacctggctcaaggatacctttcagagtaataatactcagacccctcgaccgtttactactatctaggagaaggtggtagtttgggaatccgtggcagaagatcagaagcaggagtgacgcttcggttcttttagctaactccgatgctcgcttcgcctcgtaaaggaatcgctcgatcatatcacttgaacgaacgacaattatatcggtcaagtgattctggtatggcatctcaccatcaaggcagattctgcgcaccttgtacaggttgctatgtaggtagggagcgtatctctgcaccggcttctctgggacggctgctgtgagccacgtctgtccctagcggttgcctttcagaagacggttgaatgcatagaaatcggagataaaccacccgtctttgcatgggtttacgctgcccatggatggatgggtagcggcgaggacgattgtatccttgtaaatacaaggcaatgttgatgatgtgaattttgaaggcagctttcctgggattgtatgtgatctccctcgaccaaaggctctttctgcgccgaagacgccattatttagtgatatgaagttcgtaactcagagaagacggactatatatttgggttgggcgggaggtggtggttaaggtagggccataaggccaatggacaagagtttcgttgatggttacagttttatttgccatcatcttgatattgttgttgatttgaaaaacatcggggtggggagcaatgccgaacaccagaggagaagtttgatagacggagacgaatagagagcaggatacgctggttctttgaccgatcattgttgttgttgagtgggatatgaggcaacattcgaagttagggagggtataatgatgaaatataggattgaaaagtgagagaccaggtaactgtgaaagagaagtaaaaaattgaatgaaaagtgaaagaaaagtaaaagagaagtgaaggggagacttaagagcaacctgcccactgatgacctgaaatgaccagcatcggatctcgagactcaagtagcttagagctataacggcgaagggaaagagaaagaaccatgattgagctaggcagatgtgaggaggagggagaccgtgtgcgagtagaagtttgcaggtagaacatacacttgataaaggcgacgtctcggaataggtcgaccgagagactgtggaaagagccttcgattccttatcgaagttttcagtttccgttgttctcactattatcaaaatgtaataatgagtatgttcctgtgctcattccaaaagctggttgcatatctcgccggaatcttgagggtgagcgtatcggtccggcatttccttcgcgacaccactgccgagatatgctgaaaacttgcattcgggccgatgatagcagtttaaggttaaatacccggatcacgtcacctgattctgactgtcaggactcatatcttcctttctctccttcttctcccctatacacacttagctagcagaatatagttcattgtattactcgctcttctcctagcctcacagcaaatagtaagacaccgttgcctttttgagtaacacctgaattgccgacgctagagaacgaagcgaggtacccactgccatctcaagtagtagttaaggcaagagtggattactaaatttctactagcagagatcgccaatcatttcaaagtcgcgattggccgcttcaccccctccccgtatgcatcttccaatgaaaagatggctatgactagtgctctagcaggcaactccttgtcatttagttcagtacctgggggaaatgtggaagtggaaataatgagtagttactttgtgtaccttagataagcatcgatttaaaatgagtcgtaaattccccatggggaaagagttctccagtgattccactaccaatgcttgatcgcgactgagatgcgcacgcggtcgaaacgaaccttcgggttcgatgtcggggttctcaaagtggatccgaagtgactaatacatgtagttagccccgattatatttgattggtcgaaggagcttccccttttactctagttgtggcttagctcgacatgttaacctataaaacactttcggggctgagacatcaagtgcatcctcagggggctgacatggggaccgggtgctaaagatcgtatgagctagtatcagagtaatcttaaatcttcctcctttcaattaaaacccagtcattccctcactctccacacctccacattcttcacaaaaatttcaaacccatcactccatactcctcaccaaaatgacattcctcaagacccttcttctggcggcgaccctgtcagtcgcttcaaccgccgaaaccacctgcccagcaggctggctcctaaacacctggaccgtcacaagatgctgctcaggcaccatggtcgtcgacgagcaaggcgcatactgctgcgtcactgacatgagagcttacaaagaagcactcaccaacacagccttgctctacgagacggccaccacgaccagcgacaccaactggtccacggtagaaaattcttgcgtggcggaggtccgcttcacggctaccgactactcggcccaggtctcgtcggcggcgagcaaggctgaggctactactaccaatgattcaacgagcgaggtaacctcaacgagcactacggcttctggtgctagctctggtgcaggatcgcagacttcgacctcgattccgactgcgacttcgactgcgacttcaggttcggcttctacttcaactccgacttccacttcgactacgacttcgacctcgaacgcggctatgccacttgttaccggtgaagggcttgtgctcggtggtgcggcattcgctgctgcccttttcatgctgtgatgaaatgtgatttttttgtgattgaggcccccattttagtttcagtactatatatgtacgatttcgaactgaacttaatagtacacacgagactagattgcatgcacgttgatcgtatttactgtaatgacctcaggccgccagtcgggttcctcaggcacactactcagccgactatatacgcctagagtagtgcccaacagtattgaaatagtagaaaatgaattcaaaagccgtcagatctctccgtagcatagcagatattgcttgattcaatttccatacctgtagataaccccagttgtcctcaattgttgaatttatactccgtactccgcaataaagacagaaatactgacaaaaacaccgaattcctttggttggaaatgactgaatgcagccagaattgaacagcagtctcgactagcttcatgcttagtgacgtatgaatccttccactcaatagaccctattagtgcctttttacagcccatatctgatctcatttttcaagttatacgccttcgtgcattctgagtgcctttttgcaaagtactgtttcctaatcctgagctgaatctgatatacactggtttctattcattacgtttcaatgaactctaggactgttggataccttatgtatcttcctacatatacctatgaagttcagcaatataataaaatatcattgatcttactatacctgtatcaaagctacggagtgggtccagggagtcagggactcgggtgatcgacaacatacgatggccctacaacgcatggacccgtgcggctagccttagaaatgtggaatataggaagtaatccagttattgcttgtgattactatcctgctgcctagagatgacttgaaaataaattagtggcgccccctgaaccctctggtaccacacagagctttaaacccctgctagttctatcaaagaggtgcttccttacctaactccgcctctcatcctcattgctacacccagaccgatctatttacccctttaagatgcatcgtcttcgcgactccctgttaagcccctcgccaaaaggcttccccgacatcggcgagtcagatagcatctcttatgatcggctgaatgtgcggaaaagcctcgctcggggcgaaacccaatagatgcgcggaacagcccggttcaatcgaacctggattgtcacctccagatactgccaagttggagatggggtggattccctcgaactctacgttcgtcatatctggtatatgtactaccagctcggtctatatacgtcgcatgagacccccgaacacgaccgtctagtcctcgatatcctccggattcaaggaaagggaccgttgaccaggcctggaaagggggtctacggaatcgacatcgcccggatgaccgaaggcacgctgtgaaatgacctaccgctcttagtcggtgatatgactgactcttggatcaacgactgcggagcaatgtcgggcatccatctcctcaacttttcttctttcttggccaagttggcgttcacctgcgtctgcaaggatagaatgtgccaggtcgctctcgtcctatttcggcgcacgtttgaggagagacaggtgcttcgcagttctggtgatcctggtgatcctgatgatgaggatccacaccggagcatggattcactggagattaggcatttgttgccatctgccactgcgtggctccgggaggcagattgcaatatcctgcaactctcggaggtctcgtggaatgattgtcccagcgcgattggtaagggtggccgctgttttatcgagtcgaagctcgggaagcggtcgccgactggattcacgccatggagatggttgttctgactcaagcgaccccgcgaaattcaggaggcggcaaaagaggccaacgagaaaactctggaggaatctgctaccgatgccatccacgctatggtaagggtcgcggagaaacgaaactctgacattctgagagtttatcaaactgccggggatctcatctacaaggatgaaaatttcctgccattgaaaaagattgtggaggggaaatacccctggcgcgaggaaaccgaagacggggaagagaccgaagatcacgagcggggagaagacagcggggagagcaaaatgccggaagtgagtgaaaaggaagaggagaacgcaaatggcaattaaatgacactctctgcctctttctttgtgtttttagccctaccccgaccttgtgaagttggatcaaccttctcggctattcatattgaaactaaacagccgatagaaaggaacctggtagtctgtgagcgcagcgagctaccattgggacagctgttttatgttcagccaacaactgcgcatcgattaagatgagttccagaataattggagtgtacaatgaacgtgacttacgaggagattgaggtcgtaagcaagtgggagaaccgaaccctgtcgtcactattcaagtccattcacacaatcaccccaacccgcgggccgtatcaacaccggaattccaaagtctatgggaatttaataagaaaggagttgatgtgtctgagctttcgagattcgtccactatgaactagaccgcgagcttcgatagctcgaagaaaaagaggatagtggtagataggtgcggctgaaattgtgagtcatgtgatcatgtttgtgtagaattctgccttttcctctctactatttgtctcctattctcgtcataatcaacacagttatactgctctcgttctcctagatttacgttctcatagactcttcggccccccatccagacccacttgagcggcacaatccagatcacgtgcccgaagatcatccaaccccacacactttcttctactacactcatctctcgcatcacccaatagccaactataacccgattccttcctatcaacacacacaaaaatgcttcgacgcccacgtgaagcccagcctgatgccataacctccgaaatcggagcgatccttgcacccctggatatctttccatggggaccgcttgcaatgaactaccttggcgttccgattgtactaggagtaagttgccttatcactggtctgcgattcaaccatccgctaatgcactcttgtagacagctatgatcgccgtacacgataaggactatcagacagcatgccagaagctacaagagtccgaattccataaaacagtccctgaccgcagacctgcccccgagctactggctcgactcccgaatccagataaggtcatgagaaaggttaataaaaaatacgaacgtctggataaatcaaccactatcttcgactatccagccaaccaccacctagccgtgggtctcaagttgattgtggtcccgaattcttttgcaaatcttcccatacaggatgcggctagcgacctccctacaaaaaaatacgaagtctatggcaatatatttcacccgcttgaagaggcgttgattgagagtatggctaaaggtgttctcattgatgagaatgaccaaaatgctcctacttcgatctggggagatacattgagtacttggattgcgatgatggtgtcataccttgagataaataatgatattcttgatagctgccccgataagcgagccgtggaatggttcagtgggcgctatggtcgaatacacgaggaaaagttcggcccctgggacagacgtgtctcaaagcgactgggctctgggagagaaattcccgtggatatgaggggcaacctgctggctgaatgagatatacacgattagactccttatctataatacgcggtgggtaaaaataattcatttatatcgatatacttttgaaagctttcaaaaaattgaccaatgaccttattttgtcgatctactaaattactcccatgatgcatacaggctaattaaactacatggagggcggatattcaggtagcactgatattcgccgcaaaagaaacccccaagtgcagcctcaaaatcctatggctagcaatatcgctggagtgtgccgtcaggattatagcgggcgaaaacaacggagacgaagcatcatctagacaaaggaattgtgttttattagtcacttgtccgaggagaacaaaatgctagaatcgcaccaatttccaaagatagcctggcatttgataacctcttccaggtcacttcgcagtttgggctttctctgcaaaaaggttgccaacgcatcttgaagttcctgatcacggtcgaagtcgagctcaggtttcccagggatggcgtagctcaggaggttctccacatcttgttgatcaactgcctgtttagcacctcggcgttggtattgtgagagaatcttctcccggatgatccattcagcgctgaaaatcttaaccgggtatccgttgatttcctgtgtcactcgggtcgcggactgaaggtcgtactgaggtctgttgggccagctagcataatcaaatatctcgagctctataagacgtaccgcgtctccaggcagttggagtttaaatcccgggatggtatgcccgaactgattgaccgggccaaagtcagaggggaaagatttcaagagtatgccggtaaggaggtctgcggtgatggatcggtggtcgacctgaatcaccatatcgatatcctccgtggctctctgcggatcaggtgccatgaggcacacgctagcaccacccatgatagcatagtcaatctctagcgagtctagccgttgcgcaacagttgaggcgacatactctagctgtatctgcagaaggatgggcatgtcgaaagttttctctaatgttatagtggtcagatttcttgtcccttttatgtccagagtaactgctggacaaaggttgtatgagaaaagaaaccgatttaatgagatacgaacagagaggaagagcaggagagcaaacccggtggacggcaggcagaaaggctgccccgcactcgatcagtaccttagagcctcctagtctaggcaggtcatcaggtgtagctatatgcactttagacacatgtacttaaggtattcgcgtggcagggcctatgttagagacttcttgtatcgataattcttatgtaatgcgagccaaagaccatttatctcgcaatctcccctattaccagtcaatccctcgatccgtgggttaccagattaaccgtgaaacatgcatgcccagctgtatctgtcactttggatgtctttttaatgtctgattcccttcttggccctatcaattaatctggattaagctaagaccccaaagaaagatgaaggttttcttccgatccacttcgacccgctaagatcccggcgctacctggtcaattggtccattaattcttcttgcagtaaacacgactcttatcggcggttctgtatgctgtcccgcgagtggctccgtgcttgctgcatcccgtaacttggttggattgaataccgggtggacgttaatcgacggtggtagccccagcttgtaaaaagcagttctaatatttagatctcgtatgtgacgatgaacttgacctattgtatagtagcaatattagtacattaataaattgcaagcatggtacatataatacatacctcaagttatctacatcctggcccctaaagctcacatcaagggttagccggctccaaggggggttagaaagcaggatgcggcaaccacatcacttccaaagtcgggccatggcattaatctgccattaaatgccaccatctggattgtactgccaatttcgtgggttcaccctacttggagaggtggcaaggttcgagcagcatttctcgggctgctagagggattatgcgaggcgttccttttccaaatcggttctgttggtcaatggacgtgatagtctagtgagattaaaatgttagtatcacgcgaatcccttcggactgtagctcacaatatttgaggtgatggaaggtacatggggaagaatgggatgatagcgaagattctcaccccatgctcagaaattcacaggatgttgagatagcccatgccgagtgtgatttctcacttgatgtacctttgaagatatggcggtggttttctagagaagaatggagacaggaagagccctatccgccttagccaggaagtccgcgtctgtgatagccaggtctatccaatgaaggaagagtgtatatactcaaaataaccaagatagcaagagagaagaagaagcaagtgaagaagtaagcagtgtcttgcttatataaccggcaaagcttgcaagccccaaacctctcatttagctacctagtaagcaaaccatctatgaaggcaaacaaccaaggttttcttccgatccacttcggttcgcttagaggaactatgtcgatccgggcgctactccatctgtcaaggtggggacaagcggttggaggggatctgagcagagaatgagtaggatttgcctcattaacgctgtcataatcaaaagtttaagttaatccgtgaactaagacgattggattgccgtagaaggggcgcggtactaaaaaggaatcaagacatgagggtcaaggcagacacgcaggccaatcaccaactatactcggtcaacaaattaattagagttcgctctagtatcgggatgtgataaggttaaaattgaaagaaagaggcctgaagattcagcttagctcacattaaacttgaccatgtccctacaccctgactagttatacgacttatgggaagcaggttttcataagaagattagacttggaaataggttagacattgtatctagttttgaaaatatcctttttttttctgaaaagaatagctacaaacactcaagtgtcagtatcactgactttagagatatataattcccgtacgaacattgaagtaaaagagaagcggtgtatacaattattgtgctccatgatcattggacccatctccttgaatattcagctgaatgttttgttatggttcagcggagaaatggctggctggatggtttcccgcaattagagaaatggctggctgtactccgtattctctcacaattatcacgtgtttcatatcctcccacctacgtcgtcgtatattgcataatatttgtgctttttattggctataggccacagctatctatttgcacgagtaatgagcagcttgtttttttatcactagccggtttgaagcgcacgtccttccgcggaggagtgggaacccacatccttcgattcttgcccaacttcaagactgtatttatagtgatgacccggctagcccttattattgcgttgtctcagcgatccttgcggatccttgcggcaatccctggactggtggaagacctaccactggatactagcatggggatctaatttatctcctgcttcctatggactgatctgcacggggcgggaaaaatcatccgactaagcccgcgatccacctttccatgtacggatgtgtgtacatgaacgaatacaaagcgccccacaccgtgatgatccatctggtggggggtttcgaccaagcggagttggcttcgaccgatgggagctgagttttctcggccaggattcatcatcgtctattgcttggcttctcccgagaagccgttggttctgcgcatgcgaactagcccataatgtgacctatcagactgcgagaatcaatgagggaattttcagctgcatgctcgaaactagatcaacgtcatacctagacaaagaaaacatcttggctgctagcaagtttcagccacgctccgtgttttcctgttgtccgtgcttgaccgggtgggatatataaactgcgtcaatatccggtgttacatactattcaaataacttcgaaattcaaaatggctacatgcgattataccttcacacaccagcatgggattgttccttctgctcggattcctactggtcgggttgaccttccaatcaatccagccggccatatacccaattataagcgtctcaacgaccaacctgtgatcaagtcatgcgaaatccctctaggaatacacggcgtatccctcaaggttagcttaacattacccttttcgtgaatcaccgactgaattagttgaatttagctcaagatccctcattacgacatagtccctatcgatgcacctcccacatcggctgtcctctattcacacgctgatttcaaagcgaccatccagccggagaaagccggagataccaaagacttctatgagagatgctttgctgaagcagctgccattaacctgtttttcccggatgtacgatcggagaacatccgcatatgcatgactgcgtggctggctgcgaactgcgcggcagatgacacacttgaggctatgccacctgctgcggccacgcttgctttggaagagaccatatcgaagctccaaggaaagaaggcagacggtatgtaaatcaggatcagctgcggagaactctacagtaccgggctaatccatataatagtctccccgacaaacaaagtcgcatcgattctttgcttctttcaagaatattgcgtccagaaacttgacctcagcgaaagcacctcccgcgagctgagcaatgatatatgcgatatgtgcgagggcttgcttgacgagctccgatttcgacagggcattctgcctgggaacttggaaacttacctacaattccgcggtaaaacaatgggtatccatccattcttaactctgattcgcacactgcacaaaccaatcgagggcgactatctctccagactccgagatctccaacagcgggttagtttggtgctcgggctgcaaaacgaccttgttggcctggagaaagatcgtcggaatggcgagcctatgaatgcagtcttggtatccttgaaggaacaagcggggacggatgtggatcacatgaatgacatattgccgagaacgatcgatgaggtgtgcggtatccacaatcgttgtctttcagctgcggtggagatatacgaaggactccacgtttcattgaatggggatatccatgacccgattctggagactgcagtcctggcctttgcagaaacccatctgaaatggtgcgcatcgtccaaaagatatcaggcaaaggtagaataggtgatttattagactagtagttaatttctgggctcaataagatggcgttaaggtatacgattgagtttgtctccactttgtcagcctgcaggcgccacaatgtgataggtggaagcacgtgcagtgtagcgtgatagggctaagccgattttaggccgagaggctagagcgatgtggcaagccacatttcagccccatatacttcgaaaagcggcggtgaggaatgcgatgaacttgtgattggatagcggtgagtcatgcatgtaagattgtgacgagaaccggtcgtgcattgaatattcgaaggactgcagaatggtgtatggttcacgctactgcagacgtacttccaagactcagcattggttcagatagagctgtgaatgtggaactcggcccaggtctatcggcaagatacaagcatatcggcacagtctgaatacatgatcggttgggtccagatcggttgggttcagatcttagttatctaggaagcgagggcgaatcggggaagactgtcaagctctgggtgttgtatagcaaagaaattttaagtcaacttgggaattgggacactcacacgggtgttttctccttaggttcgaagcctgtttcttttgatgtatgcgtccagttcaaggcctatctcggcccaataaaacacgctccctccttggcaatcttgccactatctgtctctctcaccagcttcgttcaggtcatggcttttgcttcccttccattatcacgcccgagcatccatggagattcctatgcagattttatatttggcctagcactaacctttgtcaacattcaatatattgccgtataaaccatgatgtctacgtctttatctgtggccaattttcttctactgagagtatagtagacatatcaaaagcgaaaaaaaaaaaaacatacaacagtgaggattcgctggtggtcacccacccaactactaactcaccggcgnnnnnnnnnnnnnnnnnnnnnnnnnnnnnnnnnnnnnnnnnnnnnnnnnnnnnnnnnnnnnnnnnnnnnnnnnnnnnnnnnnnnnnnnnnnnnnnnnnnnnnnnnnnnnnnnnnnnnnnnnnnnnnnnnnnnnnnnnnnnnnnnnnnnnnnnnnnnnnnnnnnnnnnnnnnnnnnnnnnnnnnnnnnnnnnnnnnnnnnnnnnnnnnnnnnnnnnnnnnnnnnnnnnnnnnnnnnnnnnnnnnnnnnnnnnnnnnnnnnnnnnnnnnnnnnnnnnnnnnnnnnnnnnnnnnnnnnnnnnnnnnnnnnnnnnnnnnnnnnnnnnnnnnnnnnnnnnnnnnnnnnnnnnnnnnnnnnnnnnnnnnnnnnnnnnnnnnnnnnnnnnnnnnnnnnnnnnnnnnnnnnnnnnnnnnnnnnnnnnnnnnnnnnnnnnnnnnnnnnnnnnnnnnnnnnnnnnnnnnnnnnnnnnnnnnnnnnnnnnnnnnnnnnnnnnnnnnnnnnnnnnnnnnnnnnnnnnnnnnnnnnnnnnnnnnnnnnnnnnnnnnnnnnnnnnnnnnnnnnnnnnnnnnnnnnnnnnnnnnnnnnnnnnnnnnnnnnnnnnnnnnnnnnnnnnnnnnnnnnnnnnnnnnnnnnnnnnnnnnnnnnnnnnnnnnnnnnnnnnnnnnnnnnnnnnnnnnnnnnnnnnnnnnnnnnnnnnnnnnnnnnnnnnnnnnnnnnnnnnnnnnnnnnnnnnnnnnnnnnnnnnnnnnnnnnnnnnnnnnnnnnnnnnnnnnnnnnnnnnnnnnnnnnnnnnnnnnnnnnnnnnnnnnnnnnnnnnnnnnnnnnnnnnnnnnnnnnnnnnnnnnnnnnnnnnnnnnnnnnnnnnnnnnnnnnnnnnnnnnnnnnnnnnnnnnnnnnnnnnnnnnnnnnnnnnnnnnnnnnnnnnnnnnnnnnnnnnnnnnnnnnnnnnnnnnnnnnnnnnnnnnnnnnnnnnnnnnnnnnnnnnnnnnnnnnnnnnnnnnnnnnnnnnnnnnnnnnnnnnnnnnnnnnnnnnnnnnnnnnnnnnnnnnnnnnnnnnnnnnnnnnnnnnnnnnnnnnnnnnnnnnnnnnnnnnnnnnnnnnnnnnnnnnnnnnnnnnnnnnnnnnnnnnnnnnnnnnnnnnnnnnnnnnnnnnnnnnnnnnnnnnnnnnnnnnnnnnnnnnnnnnnnnnnnnnnnnnnnnnnnnnnnnnnnnnnnnnnnnnnnnnnnnnnnnnnnnnnnnnnnnnnnnnnnnnnnnnnnnnnnnnnnnnnnnnnnnnnnnnnnnnnnnnnnnnnnnnnnnnnnnnnnnnnnnnnnnnnnnnnnnnnnnnnnnnnnnnnnnnnnnnnnnnnnnnnnnnnnnnnnnnnnnnnnnnnnnnnnnnnnnnnnnnnnnnnnnnnnnnnnnnnnnnnnnnnnnnnnnnnnnnnnnnnnnnnnnnnnnnnnnnnnnnnnnnnnnnnnnnnnnnnnnnnnnnnnnnnnnnnnnnnnnnnnnnnnnnnnnnnnnnnnnnnnnnnnnnnnnnnnnnnnnnnnnnnnnnnnnnnnnnnnnnnnnnnnnnnnnnnnnnnnnnnnnnnnnnnnnnnnnnnnnnnnnnnnnnnnnnnnnnnnnnnnnnnnnnnnnnnnnnnnnnnnnnnnnnnnnnnnnnnnnnnnnnnnnnnnnnnnnnnnnnnnnnnnnnnnnnnnnnnnnnnnnnnnnnnnnnnnnnnnnnnnnnnnnnnnnnnnnnnnnnnnnnnnnnnnnnnnnnnnnnnnnnnnnnnnnnnnnnnnnnnnnnnnnnnnnnnnnnnnnnnnnnnnnnnnnnnnnnnnnnnnnnnnnnnnnnnnnnnnnnnnnnnnnnnnnnnnnnnnnnnnnnnnnnnnnnnnnnnnnnnnnnnnnnnnnnnnnnnnnnnnnnnnnnnnnnnnnnnnnnnnnnnnnnnnnnnnnnnnnnnnnnnnnnnnnnnnnnnnnnnnnnnnnnnnnnnnnnnnnnnnnnnnnnnnnnnnnnnnnnnnnnnnnnnnnnnnnnnnnnnnnnnnnnnnnnnnnnnnnnnnnnnnnnnnnnnnnnnnnnnnnnnnnnnnnnnnnnnnnnnnnnnnnnnnnnnnnnnnnnnnnnnnnnnnnnnnnnnnnnnnnnnnnnnnnnnnnnnnnnnnnnnnnnnnnnnnnnnnnnnnnnnnnnnnnnnnnnnnnnnnnnnnnnnnnnnnnnnnnnnnnnnnnnnnnnnnnnnnnnnnnnnnnnnnnnnnnnnnnnnnnnnnnnnnnnnnnnnnnnnnnnnnnnnnnnnnnnnnnnnnnnnnnnnnnnnnnnnnnnnnnnnnnnnnnnnnnnnnnnnnnnnnnnnnnnnnnnnnnnnnnnnnnnnnnnnnnnnnnnnnnnnnnnnnnnnnnnnnnnnnnnnnnnnnnnnnnnnnnnnnnnnnnnnnnnnnnnnnnnnnnnnnnnnnnnnnnnnnnnnnnnnnnnnnnnnnnnnnnnnnnnnnnnnnnnnnnnnnnnnnnnnnnnnnnnnnnnnnnnnnnnnnnnnnnnnnnnnnnnnnnnnnnnnnnnnnnnnnnnnnnnnnnnnnnnnnnnnnnnnnnnnnnnnnnnnnnnnnnnnnnnnnnnnnnnnnnnnnnnnnnnnnnnnnnnnnnnnnnnnnnnnnnnnnnnnnnnnnnnnnnnnnnnnnnnnnnnnnnnnnnnnnnnnnnnnnnnnnnnnnnnnnnnnnnnnnnnnnnnnnnnnnnnnnnnnnnnnnnnnnnnnnnnnnnnnnnnnnnnnnnnnnnnnnnnnnnnnnnnnnnnnnnnnnnnnnnnnnnnnnnnnnnnnnnnnnnnnnnnnnnnnnnnnnnnnnnnnnnnnnnnnnnnnnnnnnnnnnnnnnnnnnnnnnnnnnnnnnnnnnnnnnnnnnnnnnnnnnnnnnnnnnnnnnnnnnnnnnnnnnnnnnnnnnnnnnnnnnnnnnnnnnnnnnnnnnnnnnnnnnnnnnnnnnnnnnnnnnnnnnnnnnnnnnnnnnnnnnnnnnnnnnnnnnnnnnnnnnnnnnnnnnnnnnnnnnnnnnnnnnnnnnnnnnnnnnnnnnnnnnnnnnnnnnnnnnnnnnnnnnnnnnnnnnnnnnnnnnnnnnnnnnnnnnnnnnnnnnnnnnnnnnnnnnnnnnnnnnnnnnnnnnnnnnnnnnnnnnnnnnnnnnnnnnnnnnnnnnnnnnnnnnnnnnnnnnnnnnnnnnnnnnnnnnnnnnnnnnnnnnnnnnnnnnnnnnnnnnnnnnnnnnnnnnnnnnnnnnnnnnnnnnnnnnnnnnnnnnnnnnnnnnnnnnnnnnnnnnnnnnnnnnnnnnnnnnnnnnnnnnnnnnnnnnnnnnnnnnnnnnnnnnnnnnnnnnnnnnnnnnnnnnnnnnnnnnnnnnnnnnnnnnnnnnnnnnnnnnnnnnnnnnnnnnnnnnnnnnnnnnnnnnnnnnnnnnnnnnnnnnnnnnnnnnnnnnnnnnnnnnnnnnnnnnnnnnnnnnnnnnnnnnnnnnnnnnnnnnnnnnnnnnnnnnnnnnnnnnnnnnnnnnnnnnnnnnnnnnnnnnnnnnnnnnnnnnnnnnnnnnnnnnnnnnnnnnnnnnnnnnnnnnnnnnnnnnnnnnnnnnnnnnnnnnnnnnnnnnnnnnnnnnnnnnnnnnnnnnnnnnnnnnnnnnnnnnnnnnnnnnnnnnnnnnnnnnnnnnnnnnnnnnnnnnnnnnnnnnnnnnnnnnnnnnnnnnnnnnnnnnnnnnnnnnnnnnnnnnnnnnnnnnnnnnnnnnnnnnnnnnnnnnnnnnnnnnnnnnnnnnnnnnnnnnnnnnnnnnnnnnnnnnnnnnnnnnnnnnnnnnnnnnnnnnnnnnnnnnnnnatcgcgcgaccgggggtgataagggtgagtgcactataaacggggtgagaatcagggtgagaatcacccaggtcgcgcgaccaccgcattgaccccttcagctgaaccaacggcagaatatcattggatcgtgttgtttcccttgaaacactcgatatcttggcatctgcatataactagaactggaagtatcacacacctaggcagtaggcaagttggcaataccaatcgatttggttaatctgctcaaaaagctatctcgaaatcgagctaaacgcactcggcgggacttatatcacgggccaatcagagctcagtgtaatttagatataactaagaagagaggttgggaggaaagatccaccacagcggctgagggactagtgtttataaacatgagagaatcttcctagctaaacctctttatgcagacctgtcacatcacaagtcagtggccagccacaaaagaaacgctaggaaggccaactttgaaagcggagggccaatcaacaacgtacaagtttggacgccacgttcagctgtatcggcacatatttgacccctacactgcttggcagaatacttgcaggagtggttctcttggttttctaacagatatcgacactaaccctcatgtgggctgtgcaaattgcctaatgggggttgcgcatttatgcgcaacccccattaggcaaggcaaggcagataaattacaccgatcaaatggcccacggccctttggaaatgactcggaacatggccgtccagtaatattatcccgcccccgatcggacattggtgaaaatcatctgcggctggagtaagcgctttgggatgactcgtgtgattatgcagcagatacattatttgtcacatctataggctaccccgcttatatcatgaaagtacaccacgcatatatacacaggtgcctcattgggaactatcatttccatccatctctttggactcaacaacgactatgtctcaaagcaaccgtgcatttcaattcgaaggcagcgacagtgattacatagcctttcttgagagccggctttcagctgccttaagccaaggaactagccaggcttctgttggcgcggcgatttcgcggagcgatgctccagcgaccacatcatcggattctcggccgactacttctacgactgtattagcggactctcaacaaggcactttagctatagcatcagcggagcctcagcctagtgactatcggaatggatgttcagtgtttcgggcttctcgtccagccagtcctcgtgcgactggatgtcctccttggtccactagagatgatctcaaaattctatattatgacccgatccgaaaccgcgacaacgatcttcccgataatgctctctccaggttgccatcctttaagcaaacatcggttgttgaggcccaaggcttgaaggagctcagacatttcattgaggacgttacgaggaagtctcattggattaaaaagaagaaagagcttggattatctcgcccagaaatcaaccaagataccattcacgcgctgtgtggtcgaccgtcagcctcaaacctgcgcgatgagtcaaacttatacccaaataatgaaccctcagaacacagcgccttgattatgcgaggatgcgactatggcgcgttgacgaaggatagaaaactgcaaggaaatcttctccttcacatcgccaaataccaacagctcatatttgtgtccttatgtgtcgtcatgcttgaaattggagctccgattgatagtgtggactggatgatgcgccgatatatcagtgatactagctcagcgaatctccggcggcttcgatatggatgtaaatgggtaaatcgttgcatgtctaagttgttagaacggaactggggttttttaagttgggaagctttcctgttatgttggtattcctatccagagtagcttcttgatgctgatcacctcaaaagttccccggtctatccaacaatacggacgatttgcatacacgaaaaacagttgcgaaaccttcgtgacagatatggggacgcccgatctggcacttcccttcgctgaggatgggctcagtccgtactgccttccttgtttcattaaagtgatcgccggcaacgacttaaagtatattaatctcatgaatattggtgaacacatgcttatttatacagcctagttgatatttgcaacagtttgggctatagcatcctactcgtttctccgatatacgaaaactacttcaataatgcccccctggacttcaatcctttcatacatgcatacagcgaacctgtcgtggatttcaatccattcacatatgcacataacgacccggtggtgaattttgacgccttcaaccaagtatttcccagtggcgcagacaatccatgatccgaggagggagaggaagaaacagaagcagcatgcaagctgacaggtaggctgacgagaatgaaaccagttgtggaagttatatgcaagaaggaaaagacgaaagaggaaagagtaacgcaagagctggccgctgagtaatcgactcattattttgtccgtgtgcgatcagcttaggaacatgttagcgacgggcaagcgctgagcggctttcctacatacctgatgatagggggaaccgcaaagatagccgcgagcctgggctcaacggttacatcaccatcgattcgtctcatcagaccatgcttaaaagcacctccgggttcgcttcgcgccgaatctgatatgttgcagataggtataatattgacggggccgggtaacttgtcccatttgaaagatgtgttccacatccatactgtgaagttccaattctgggaataaattagtaggtcgccattcatagaaacttccaaccatactggaaggccaactgttctgagaagaggcttaacgaaaggcgaaacctctttgtgctcatactctagatttcccttcccatcgtcttggaatttcatgccggaaagtgccagcgcgagggaatctagcaggctctttgcttcttcgccgagagatgagtctgtcatactgagctgtgtcagtacgcgatatcggcgagtattttcaattccggcggtagatctcaactgtccaacgtggagtcaaataacgcaataatgtgggcagatggaaacgtgtacctctgttttcaagcggaagaagtttggagcgaccgaggtgtggataaaagaggaattgccgtcgcagaacacttgaagatgaccgcggggtgaggggcactctgacgggtcccgtgaccttcggtacccatcgttcgacgcgggtccacgacaacctagtgagatcacagcccgaccagtggagatactatttggatgtcaaacatccgtcttgatccttagcatgctgatagtgatttttttctctactaacacccgacatttaccaagttggtattttgcgaacattttcccttgcatacattatccggaatttggttccaaggttataaggtatgcttacttatcgtttcatgcccaatagagatcgaccgcatatatgtggtgaatctccattaggcaaaccatctttcaccaaagtccagtgggaatgtgacatcactactaactaatttacaatgtacgggccgtattctatatcattctctctgttattttgctttagtaaaacccacaactcgatctctaggagtggcctagaaaataaccatcttaaaaccaaacctatgagaatttatgactcttcccttttagtcgctgcaacgaaaaccacataagatcaaggttttagattgatatcacaatactcggtattaagaacacacccacacgaagaagaaatcgataacaggcactaaccccagggctagtgccaagagattacttgatactgacaagttaaatcaaaccgaattacagggttttgattcaaatagctatcttagtagattcttccaactaatcacttgattggcatcaacatatgttcggagaagaaccagcccgggcaaacgaagctaacccggtggtttaagatcatattgttcctttcttcgttataatctaaacgtgcccccgccagagcagaaagcacgcttattcatggaccagtccagcccccaaacatctgccacgccggaactcgtcaccattcccatcaaagagaggcaatccttcgattttgatccgccgacatttacgcctccattcccaaacttcaaccccgcgtggactatttgccatgttgctggcacataaggtctgtttagcttaccaaataggattggactctagctaaccattgcagtgccggttgtgattgttacgaaattgggcgcaagatatgttgctatcccgtgtaccgaagaacttttaaatacttgctaccaactattccctaatcggggccttatgttttccatcgctcaggtttataccggcatgatgaagatatcgtcccactcgactctccatggacaggcaggaatggctatgttgcaatttcttgactgggacatacactactctattaacgacaccgacgcatactcagcaaaaatagcgaaacgacttcagacagatgtgcttgttcggatggatagagggcggatagaacatatccagagatatgatctgcctttaaggttaggcacactggtgactttgagggaggagtgcaatttctagttgattgaggtttcatggtgtgattttaccacccctggggttaggttaggagatatcacagatttactggcatgcttcaaaccataagtcggcgtttctctattgctccccgtctcgatttgtcggagctagtttatttctattatttcttccttctccagatattacaggccttttgctgtggagggttgctagggagggcaatttggcacagcaagggaagcgctcgatctgtatctataattggtgcattcatatcaaaaacggggtccgcctccaccgccaaggtgatgctgagaagtcggacttgcttgatatttaagctcgattgaggtcctattggtggcagcataagctcctctgcttctggaatgagaaacttcgcttgtattatatatatcccttgccctacatccggattgaaaaaggaacattaattgctttaccgttgcactattgttggtttatccttatattctatgcacttctgattatattctatgcacttctgcctctcatttctctacaattgaagttaggtataagagcccgcgagctatgtgtttagatctgtgctgacttgcttcgtctgcaaatagttcgagcctcacatctccattgaaagcaatcaacgcaccgttatataggccttgattattaaggttcgcgatatcattaatccaaagtgcatagatagaggctaatatagattatagtgaagcatcatgtgttttcaatacacctatacttatggatgtgaatgcgtggaaacagctccactatttccatgtgccgataaggtcaccaaaggtctctgcacaatgggagaagtgctaccaagaaaacagaatttcaagcatcaatatggcaagtatcgtatggctaagccttaaggtttgaagccagggcttattctcacttccattgatgagcacagtgaagctataaagaaattgatagtatgaatttgaataataagtcattaattagactagcaacatcgatacaacagctctctaaaattgctaagtaacgtaggaattacccaattaaataatcacttaaggcttttagaaaaggtattccctccttcatgctctttatagaccacaaccctctaatttcctagagttaattacatctttacaagaactcaccattttttcatcggattagcgcccaagtctgttttcgtgcgatttatattaaagaagccccaacagttacttatatttatcaattagacgaacctatagaaagctataaagtgtctcccttcccaggtaactatcctactaactatcccagtcacatggcattttacctcctcttctcttagctatatcaataacaccaataacacctaccaagcccctcactgcgcaattgctacaggttataaatcaattttgtatatttttctttgatccaacacatagcagatatgtaactaactattcagtccataaaatggataaccctcagttcatgattgaacacggcgatgtcgctacttatatcatctcttcggccccgtataatgataggcccattactaccgatctactatctggtattctttctcggcatataggatatgcccctccgacgttcattaagaatcttatagggtcaaatgctagtaatacagacttagaatatatggtcgtactatacagtctgctaataatggatatcctgccgcccagttccctacatacaccaatcaagcgtatactttactcacataatggggaggaccttatacattatcttatggataatttggacattagggtagagagccagctaggaaggatataatatctctgttagcccgactataggaatttggccaatgcatttcgagccgttgagatagtagaatcattaaacgcctaggggagatggttgttttctgtataaaatttgttcagctcatagttagatattgattctccgatgaatagagaaagaatgtacttttaggactattatctagtcaatgaatatgatgtgatggatcacgttatgagttgtgtggccttccatgctcggtgggagataagttcgagtcccatatctccattgaaagcaaccaacgctccattgtatgaaccttgattattgaggtttcgaattagaccccctccgttgcttactttatcaaattaggcgatcctacagaaatctataaattgtctcattcccagataattattctcacagcaagtcttcctattttcccttaaaagagagacttgccggtatgtccttatcttcatcgtccacaattagcatcatcaatgttagccaaggcctatctggcctaagggccaacgtaagccgtgttttcgtcatttgttaccaagaatataatgcaacaggcacaccactataagttgactcctagcagcacagccaatttatctaacaaaagaataaggggcaaagaaagtatcactagagtgaggcttgaagaggggtcactcactcccatgaatgattctcattctatcgcggctatatttcagaattcagaggttatccaagatatctcggacgatccacaaattagagggctgaaacttatcgtatacgagtaggtaatatattcttcttttatggcttaatgaccgacgaagtgataatcaagcccagccgagagtacatcaagtacttcttatctataagcacaagtcccccactcatatatccaaaatcagctaatgtcccagggcgttcttgatcagaatcgcagctccgcagtctgcctttataccaatctctagccatatatccctgccacaacacgtacaggatatcagcccatttgacgtatatgagcaatattaaatgctgtggatgcctcggtgccctagttaagcacccttatgatagttagttagatagttagatagagagctctctcttcccctaatacaaccttttttacttctatctttagtacctacactctgtattttattatataataattgatttccttccgtattctgatactttattatttctttcgattccttccatactaaatttcctagtacattccagtttactagttacttctaaatatttccataccatagctcacatatggttcaggcaaagattgggatagacagaagaagctcgacatagcaagccctttagggtcaaggtaaattgtctgtttagttacaagatctataaaatctgaaatattagctcggtaagaaggtctggctctttgtcaattatagcctaccattggacaagtggcggatatattttcctatatcaaaccgtactgctatagttagtgagcatataaacataaatgagcttctcttctattttgattgtattcatgcctctagataactgcaacaaaaaaggcccatggattgtttccctatactcacgctacaaagcctactgccgaagtgggttggtccttttttctttcaagacaatccctcgtcagtctggggagatcaagaaaatcgtaagttgcacaaatacgcgcaatgatagtattctcgctcactataaggtatagaggacgccgaatcagacagcatactcgagcttccaaacatcgaggttccaaaaatcatcaacttttggcaaatgccagacccttgagtaaatactgctgtctataaaggcatagagaatgcagagtcttctctagggccagacaatatccttgggagaatcgaaaaattgccaacagagcttatagattccattatcgaggctagtgttttttccgagccgcttggatcacatgatgccttacatactctacaagctttttgccaggaggagaagggctctatctttaaaactaggattcacactgttcttagaagcctttcgcttcggaagagatttgagactagttgggaactctaccctaactttgaccatacgaaggctcgtcagtgtactttcgataaaactgctctgtatgatttagccttaaaagcaattgtcgattgtccttagtgctttatgtttctactcgatcactaaataattagtccctcctctttttatcgggataggtaaaccctctatctgattgcggtaaatttaaagaaccctgatttgatagagtggacaatgtctgcgatagagcccctcgacctccttaaacctatcttggtagagggacatatgataatattataattcactacctaggatgcctagttgttctagagctgctggaaacgtcttcgattaatacctgaaattgaattaatacttagactaatagaaataataaatctatataaatttactaatatagatctagtaaattagctattatactaaggtgtggatcttagaatccctaatccaaataacggacttctgaattggtatcagcttttataccaataaaaccctgaaccgatgttatgttggttctggagccataacgaagagatcctagaagacctcttgacttatgtggcgagacgcaactgtgtggccggagtggtgtggatctcgaaccataccgaaagccacgacgactggcgctaagctgtatctgtagctgccgataaagtggagcgggagagcgctgaaatatttgaattccttatataatacccgcctccgggatatagaagggacagcatgggccgcacgggctgtatactctctgaggatcttttgatcacgatcgtcggtagagcgtgctctaagagttgtatatatgatttgctcctcttaggcgaatgctccaatagtgatatacaacgtttgcaaagcgataaagcatggttggaagaggttgctgctcagaagatccaaacaattcaagggttgaatgagactgtcggagtggttagcattaaagttcaagcgaggaaagccggtctaaagttggtgacagaagctctagagactttcaaaggatagggtagcattggtcattgtactcaatcaagttggtgcccaaaatatgtacccgaagctcattcaatccccgggtatgcctactgttgccggccgactaggcggcnnnnnnnnnnnnnnnnnnnnnnnnnnnnnnnnnnnnnnnnnnnnnnnnnnnnnnnnnnnnnnnnnnnnnnnnnnnnnnnnnnnnnnnnnnnnnnnnnnnnnnnnnnnnnnnnnnnnnnnnnnnnnnnnnnnnnnnnnnnnnnnnnnnnnnnnnnnnnnnnnnnnnnnnnnnnnnnnnnnnnnnnnnnnnnnnnnnnnnnnnnnnnnnnnnnnnnnnnnnnnnnnnnnnnnnnnnnnnnnnnnnnnnnnnnnnnnnnnnnnnnnnnnnnnnnnnnnnnnnnnnnnnnnnnnnnnnnnnnnnnnnnnnnnnnnnnnnnnnnnnnnnnnnnnnnnnnnnnnnnnnnnnnnnnnnnnnnnnnnnnnnnnnnnnnnnnnnnnnnnnnnnnnnnnnnnnnnnnnnnnnnnnnnnnnnnnnnnnnnnnnnnnnnnnnnnnnnnnnnnnnnnnnnnnnnnnnnnnnnnnnnnnnnnnnnnnnnnnnnnnnnnnnnnnnnnnnnnnnnnnnnnnnccccgacgactggcgctaagctgtatctgtagctgccgataaagtggagcgggagagcgctgaaatatttgaattccttatataatacccgcctccgggatatagaagggacagcatgggccgcacgggctgtatactctctgaggatcttttgatcacgatcgtcggtagagcgtgctctaagagttgtatatatgatttgctcctcttaggcgaatgctccaatagtgatatacaacgtttgcaaagcgataaagcatggttggaagaggttgctgctcagaagatccaaacaattcaagggttgaataagactgtcggagtggttagcattaaagttcaagcgaggaaagccagtctaaagttggtgacagaagctctagagactttcaaaggatagggtagcattggtcattgtactcaatcaggttggtgcccaaaatatgtacccgaagctcattcaatccccgggtatgcctactgttgccggccgactaggcggttgtttgctcagatgaccttaacaaagctttcctttactagttttcaatgcagcagtctgttcttcctgtttggattttggatattaattagtccccgaggtcatactatctcacgcttaactaagcagctataggctcttcagagctagggctttctcaggtggcggccgaccccgcagattcggttatggcgtagactaggcatcttaatgggaacgattatgcatttaaaataccgttactatgtcgagtactatggtcttcgtacaagtcaggccactatagataaactacgaacctctcatatttacgctagtggagtggaaaaaccgagtgaggaaatgagtttccggacaactctcagggtcaatacttatatttgctagttttatccagattcatatcgagaaatgcaactagaatcatctcgattcgaacatgccaaatatataaagctccatatctcgttgtcttgcctttctatccctcctcctcccagtttcaattacaactattctctatcaagctagactgttcgggcctagtacagggacgcaaacatgacaacagcgcagaacagatcgcctcgttacaataagctatctggaatggagatcacaggctttatggtgttttcagcttcctctaatagagctaatataaattccaaagtaaagtagtctctatacttatagctaaagatagaaaaagcccctttagtctatagtaggggagatactgacacatatacgcggtttttacagcgtgggaccgaggaaagcgacgtagtaggtttaccaaagagtatattaaaccaaggctgacaaatagaagttcactcagaaaatcaaggaggctataggcaaagttggctttacctatcgtcaaggccccgttatcgttatctcctccgaaaaacactcatagggcactaggcttacgcacctagctcatcctgcggtatctatctttcgggatctttcgaacatcgaaaaaaccagagtgacttttatgctatacccagaggatttaacaaaagaggaaacgcgggaaagccaaccagttaagcggaagctacggccgaacgaaatccttttcgtgaaaggatcagtcagaatagagatagaggttcctgctggaggctcctttatctggcaagggaacactggcgcaccaatagggcctgatatatacaggccagaggtttttgaattcatgacagtttaggcagctcgcgtcctagggaatcggtagtattagacgcggaacctagataaagaattgtattagtcataagatataataaaggatataagttactaccaatacctgatatttagacttaaaatagagaagtcgttatacatcaataagaatattagtatggctagctcttagaagctgcatggctttagcttcttcgataagagataatcggcagaaagtaggcaagaccggggcaaacagaagtgcaattccctcactaaactcaatctcaaaccttctaagctttcacccctattaaagagcactacaagcattgtgatcgcttaaccgccctaggtgatgaaggaaagacagtatcgaccagataccgcggacctgactcttaggatgtgcacagtctaatccttgtgtccatagccattcttcctcttctaaggctagagaagaccatcgaaggatagtttgtaggcacacgatccataagcgtaaactcgcaccacatgaaataaaatccacagctgtactagtttccacaatagctagagagaggtcggcttccaaaaaccttgaaaaatgttccatctaaatggataggtcgtaaagcagaccctccgcagtgactggtggattacagcgagctaacattgtcaatacgtgaaagtgggagtcgctcagataggttaagtctcccccctgccgctgactcagaaacctggaaggtgaccaaataggtatagtatagaatacatccccgcagggatagttggttactcagaacatagacccacccagactctgtatgatagtacatgcatgcccctgaaatgggtatctttgtgataagggctccaatatataagcaatacatcttgccagagaaccgcggatccatatactacccatcaactatagcaaacatctttgcgaaccgatccatgtcaaggctcaatatcttcacgctgctaatggtatatttcggggtctcaaaggtacaggcaaactctgtttagcagattaaaacaaattaactaactacttaggccaacactaaaaattacccaacagaactaccggattcccttcccttagggaacattaagactcaaccgggcaagatctaccctccgaacatacaaggacagccaagcagcccgccagacataagacttcatcatggtggagtatctattcaaggagaagatccaatgcgcctcagcggaggtcttagcgcttcgccacatagagcagcaagtgatcccgtgccaccaaagggaaatgttaccaaagttttatctatcaagtatccgggagctttagctttaagcaaagcaaagctacgtattataattgagtcacaagggaagcaaacaaaggggtagtacaaacataagaaattcgaaaagagtaatagtataaggaaggcactagaagaatttagacctacatggcgataaggaatacagcgtcataatatacagtatactcggtgaccaatacaggttaaatagggatataatggaaagagggcatgcattctaagctatactacttctagacatatagcgcgtccttagtacccaaatttgcagctaaattgccacatttcatatcgccgcctcaatactgcttatattcactggctaaatcaaccgacataccgaatagtcttaacagatttaacaaataacaacgctggttaaggtctggggacagaataatatctttatagggtatacattctgagctatactattttaggataatatggcctttagacattttatacataattagcggtatccgtttattgcttacagtcaggattctcctctataagaagctacttaccaccttagacaaatcagggttctgccgaacaccaagggttccaatcacactggcagagaccagcacaaaagttctttcaaatggaatcactccaggtcagtatatatcctccttacctaccagaatgttactgaagcctaccatatagactatacgtatccaatctgattttgaatacaatatttgcaaccaacaatccgacacataccatgccctcgctcatttcaccttggatattccgccaggggaggatagcaaggttttcattgctattccactaggcaaaggccagtttaacctagcagtggaccaagctattgttggacgagtcaaatcccaccacaccgatctgagctatttacagttgttgagctccgatctactttttgccgccaagtttggtcgttcgtatgccgagaccgcgtttcatgcgttgagtgaaatgatatccaaatacaatatagcagcgggttcagtctatatttcaaatgaccaacgcggtatcaactggtttgaggcccaaatggagcgctttaacgaactccaaacccatttttataaacaaatcttgccatgaaacttctctgtaaaatttcgtgtgggcaagagacaaagtgcagcaaggcctagaattcgaagagcaggggaacatctggcaacaccgcatgtaactagcaccttaattaatgcaccagataatctgcccaaaaatatacctacaagcccgaaagtgctggttattctacttcgctatcatgtgctcaccccgatgaatgattagtaagaatatattttcttttcctgcctcataatattttctttactttaacataacactgcagcatttaattgcgatgtacccagattttggatcatgccgctaaacagaagcgccacatccaatgtctactaggaatagaacggtcatcaataaaaattttgcaatagaatgttgattgcccggccgatcatagcatgaaatgcaagcaacttctctatactgcatactctcatgaattaagtcacgaaccctaatctgaaacgagctaatctaattttagttcaccgctccgtaatggcggcagaactgtaacggtaatggtcatacaaaaatcgataagtcgtggttataatacagtaacgccccatagaatcgcggagcatcttttatgcggaagtccaattcccttgcgatgtcaacaaccaagacaataatgtaaactttcaacaccagggctataaatatatagtacagaatggacttatgtctctttggattgaaggcattgctacacgatcatacgttagttagtcttcgggggaaaaagaactacggaagacgcctggaagggcgagaatcactcaccatgagccaacccataccctcagcaataccagagccatccacagcagagcacgcaatagctttccactctcggttccgaaattcgtctagtttcaacgcctctgatatctcctccggcgtctttgccccctctagatcctgtttgtttgcgaacacgagaagcggagccgtgcggacgtctcgcacgccctcgaaatccagtaagtacctcagttcaaaagcagcgttgtccagccggtcgatattagtggaatcgaccacatatatgatcgcggcagtatcgctgaagtagtggccccacattggacgcaacttgtctcggcctcctaggtccttaaggcaatggcaagtgggtcagcatcaatagcacactcaggttatctagaagaggctctctggtccaaaaaaggaaagtgatatacccaaacgacgagatccacatctctattatatgtcactgactccacattaaatccaattgtggatactgtgtcaacgggcccgagattctagagacggccgatacttagtgtttaacaagcgaaatgcccgtggctttgtattacctttagttgtgagtagaggatggtggtctttcccgaattaaactaattatacaacgcgtggtggtcagtataataccaggtaggcatctccgagtgcgtaagacgccgaacgtacgagtccccacatcaagattcgatactccttctttcccaatagcgagggcagtagatgcgatagtgaggcgcccatgctagtgatgggtgggcgatcaagcggtggctcgttgctggaacgtaagggtgggaagggtacacgtttctgtgagtgtcgggaagagcacctcgttcgcattgacggacacgctactctattatataccaggctacgccgggcgctaaacccgagggggaaaggagaatccttgaaatgcacgtgacttgatgatctcgcagttctcttatctgagggatgtggctggttattgcttgctgcgcttgatatgagagttctggcttgggtcgatccgattcctgggaagatggtaattacaccgatataacaaacttggtctgcgccaaccttattccctgtcctagaataggagtcatctgatggtgggtctgaacatgtctaatggtcaaatagatgtggggcgagcatccatctactcgaactatcactaaatggatatcaccgcctatcatcgcggcagtttttagtatttataatcccgcaccttccaggcacactaaatcatttcaccccttataaagccgtacgacatatgagtgctttttggaacctccttattatgtctttctggacgtgagatctgattgcttcttcctgcctcaaaatcctttctacacccactagcgttgcacgtttcgaggaaatgaccataatagaatctctaccgtttgatatcatatcaatcacactccatactctcgatttaaattgccccgctcttaaatcactttgttacgtctctcagttttttcgattttggacgcaacccctcctttttaggaactttcaatcaagtttgactaagataaaacatcagtccggctgtaagtatttgggaatgctccaggaaattatagatgcgagatcctatggcgggacatgtctatgtttgtcttatttatgtcatgatgtcataggaaatgtagttgtcattgaaattgtgggtgttccatatatagcgacggaactagaaacctcaaatacccaactgcttacactttctctgcgcagtctccgtctactagctcacataatccatttagcattccaatggttctctattctcttagcaaagagaagtcttttacatgatctttatattgaggaatcgcctcttaagaacccccctgggcactgcaattttatccaccctcagatctactggttagactcgtattcggaagatgggtctcttgggtaataatttctccagatggatgggactgaaagctgcaaaacagcgggagaaagatgaagcgtcacgtcgcgattccgatattggcaggcagctgaagcttgaaaaggaaaaagcgaaaaagacctttaagatactcttggttggtacgcatacgggaaaattttctgctgagataaccaggagaatatactctttcctctatcgctccttagctgtgctgtaacaatatattctttatttagcaggtctaaacgcagcaagtattcaagtaacaacagaataacaaattaaatggaacaaggacagaatgagcaaggctcttagacagctctagacctttcgataaaacggtgtgatcgtcgaagcgttgacggaataaccttgtgattttcctccgacgtgatagtctcgcttgtggacccagagtgtctgccttctgggacctgtcaacaaaagctttgtatatgactttaggttcagcttaccagcgtgagacgtttgaagcgggctagcctcgatgtcgtagtaataagcttgcatatcaaaactgtctgtaatatccagagtttcatccactaggcaaggattgcttgtaggtgattgcccgacgacctgaaggcttccatggtcttcgtaggctagcgttcttctcggtaatgggatgaatggcaaagagatagcctggcttctaccatcggtataaaagccagaatgatctatgtcggcctcgttcagatccattgtattttcacccgagggcattgagtagagagctctggtgtcatcatactccagctgtcaaatttataatccaggtggcccaaaacaagaggttgaagcccttgagtgcaaggtagaacaggaagagagagatcagagcttggttcaaggaattcattctggagcctagaaaaaacaccttcgaaatatgtgcaattgtagaagcaagcctcctcaataagagcttagaaaattgaaagccaaacgcttgaggcggactcgttacagacagcctacttgttacgttggcttcggatttggcgcacggttacctatagttaagagagtccttctagaccaatgttaggcctgtgtttcccaaaatggcagggtatgggagatatgagccatgtcgctcggtgagagactttttgggggactgacagaaataagagctgttttttgtgtggaatccaggattgtgcagagctgaccatatccgaaccatatccaaggaatggaaagaagggaagtcagtcagcctttttaatacccaggcgcggccagagcattattagccgggaataatgcagtatatcgcctttcagacacccatacaaccgagaactgcgataccactgcctcgttgatactactcctgcttgcgtcgggtgatcacttgggagtattccgggcgaatttaggcgacccgcctcgtcgaagggcgccttggattcgtagtacctactgtgcaagggtgccgctttcttcaacctgtaacgttgcagccttcaagacaccttagccgaggtttgagggattaggaaggaattgacaagaaatcaatacgagcggcagcctacagttcactaatcacgcaagccgatcatgtaagccatcaatttcatggatgattgtgatgcctcagctcagcctcagagctccttggggcatttttgcggttggctagtgagcgaaagcgggcctaatgagcgacttactgatgatagtctaactactacctgaacggattcttatagggctcttccggcggagatcccaatgtcgagacggtaggcttaccgaacgaacccgtatagggtcctttaagctatttctcctagacacggcgtgagaaaccagccactcaggttgacttcttctttcatctctcgtttcgcagtgcccgaaatagtttagccggatgcctcaaagcccccctcaggtggctcccaggtgaacgcccaggagttctttttgcctttacattcatcatcttcgcataccggtgctcgtagacgaagaagaatgtagaaggtaagcctttgaggaacataacaaaaataagagcacttgcagaaaaccgggctatgtcgtcaggctgtttgtcctgaagaacgaaagggttatcgatctcttccacagacaaaatggaaaagcccatgatgttggggtgacgttgaataaacttgggaaggaagagtatgttgctgtacgctcgctgctcattcctgggggaacactagatattcaagctgctcggtcccactaagtgttatattccattgctgtctagaagttctaaacaaaccatgaatttaataagacagcccgagtggctgataccaaggcttaagcgcgccaacccggcctacacttggtgagagaggctctagaggtcttcaagattaagacgagttgatcattgtactcggcaaagtcaagaaatgtttatctggggattgtccaattcccgtggatggctgtctttgcgggagaatagacgcttgttagctcaggtaatctaggcatggtttatcccgcaaagggtaagcatttgatatgtcctgtggatggtgctcggcagataggacagctcttcgggggttcgagtttttctgcgcacgactcgcaaatcaagtgcccacatagaattgtcacccagtgatctggttgcatgtaacagatcttgtactctaaaacacgcctttctctttccctggaaagatccacttgcgccttttggtacctctccttctcctggcgaagttcaccttgacgtattcaattttcctttttcaaccgttttactttatggcggacttccttgttgagcagctggaaagcgttgtcctaatctattgttagataaggacgaagaagaggttgcgaggaacaagtactaaagcagacggcttcttcttttcggttcttttccgtttccgcgatcgagtctcatcttcggctgcatcgataaacatgccctcggaatcttcgtagctgttattacaacgaggggctctctgaggttgtgggctacctggctggaggtttggcagtttctcgtcattggctataataatagtgttggaatggcttgccattgtggcccggtgtttacatcggaggaatgttaatccagacgggtataggaagagaaaaagaaaatattatagtaagtaacgggctaggggaaggactttatagttgagactaacagtatctgacatagccccggcacttaataggacactgatgagtagcattatatgattggatgtcaagcccgcttatgtcgagcaattaaactctccggttaggatagatgtctctccattgatattgggttctctttctcatcagttgtaaataaaatgcagaaattgctggtcaaagattataaggaagcccacagtggttaaagcataaccataatagataaaagagtgctgtgggaagatgcaattgttcggaaaataaggtaaatctgataatttctaagttaaactaaattataaataagactgaaagcaatatatgaggccagcttattagaaacagtaggtaagcaaaaatttggtttgacaccggctcataataagactaaaggaacgtataaaatcacaagtccttattgtgctgtgtgcccacggttacctcggcgtcgtctccgctgcgattcttgtgtctcttaagggggcatcgggctacgtatctttagtagccgaatctgacgcttaagctcttttatctctgtcgccgagtcctttcttatcttatgagttgattttcgtctctgtgtagacgaggctagaccacgagctggcttactgtggtatcttctgttatggctgtggcttgactgaatagaggcgtcgctcctatcgtcgttacttttactagccttaaagtgattcctcgtctttgatctacgttggtttgtgtcgcgtgcaggctcgctaacttcactatcataatcttctttattaatatcgtctaatctatgctttctacgataagtattctcgagttctttagctttctggtatatcactctatcgccatctaaggtagagccggctgtgatatgacggatgaaggatctcccttctaaagtaaaaagtctgtctttctatttgacaagtatccgagtttggggatatactatgcctttagcgggtaggagtagattgagaggattaagtccctacttatcatcgtcttcgaccttctaactgatgccaataaagtcctccacgtcgtttcgcttgtatttccaaaactccctaagaagcctattcctagtcctagttactttagcggtattacaagtctttatagttaaaatacgttctacccgacttgggttgtagctcttatataacccggcctgaatgtgatagatcggcgtggaccggcttctgtagtgcacgaatatctgagagctagtacctttgggccactaatataatactttagccgagtgtaattggcgttgctatttcattgttcttgcttctagggtatcaagccctgtgagttgaccactattaatattaatatctgattcggtactagactctttactagctgagagctggcgagtctggtctagctgattgtttccactatcggaagtggagtcggtatcttcattaatactaggattttgtgtcccgattaattgttcggcccactcttaactgatattccaggacttaggaagataatgtcgtttgttgaaggtctttagaagactacgtgttgtattataagccgcctagaattcatctggagagtgtgtctctattaccttgtttgctgcttgctgctaggtattgtatagagtattgtagctagtctcgggtatggtactagtgtcaatgtcgttgacgtcgtggtcttcgttggcccctcgaatgtgttagttaagtctttgaaagaattgaagatatgctttgtaattagggctataggatgtgaagaaatccttaactattttttccgactctttggatgtctcgctatgaatgacatttttgacctagcgacttagtaggtctagcttatatttaattagagtatcttaattagaagtatccctaagttcgctatctatttcgttatttaatttatagttacctatatttagggtaaagttatctaggagtattaggcttctaataaatcttgccttctgttcgggagctttgcccttcttattttgactatgctcttgtcttaattcttatgcgctcgaggatttaggttgatgggattcggagtctgagctcacttccgtgggtgcgggtgtttggatatcatgggcattttgctgggccttttgggccttctttctcgactttttgaccatattgtttcttggagcctagttaacttccctgtattcggatagagaaggcataatttatattccaagctcgcggtagtggttatgcggattgcaaaatcgatgctgtaggccaaaaaccatgctataggccagaaaccatgccgcaggccagaaaccatgccgcaggccagaaaccatgctgcaggccagaaaccatgctgtaggccagaaaccatgctgcaggccagaaaccatgctgtaggccagaaaccatgctgcaggttaaggacgatactgtaacgtaggagcaagcccgcaattagttcaatttctagttgagcctagttgagttacagtcaaaaatcaattgtggtaatatcagcggtatgtggatgggtgactgacaaggtaagaggagataatatttctaggtaggattacagatatttagacgagctctgtacatagacaaatacaaggctggcggaagtatatccctattcggactagtgttatttaggtggggcccggggagtaaagagagaaaaaagactggaaataataatgatttggaatattacaggcatattcgaaatcagttttaactcctcaatctcttcccttaacccatggccccacctcttaagagcactagtccgtatcgagacacatttccgccaacccctgcatttatccttatccttgattagccagcataaattacagtatctgtttcttggcattattcagacgtaagcaactacaacgtcgtcgttgggtttctcctgcatcgctctttaagtctcagttctctgaaacattctcgggtaagtatattgagtatattcagttgaacggtaatgtaaggcatcgccatataatttcccactttgtaaatgcatactgtagctatatacggagaaacagtcgtatatgcccgtacatggtggcagggcctgaagaggctttgattgggctctgattggtaatacgaaagtcgcgatcaggttgaagcggttcgcatttatttgaatctgttataaggtacagagctcctaacgttatgagtaccacgtgactgtgattgtacatagggtgtggcacgcctatgacgctagatattgaccatagctacaaaaaccagactcagcgtcgctcatacagcatatatgtatggttatggcttgcgataaaagtcctaaacttgtagttctcattgacgccgataatgcgcaattctctatcgttacagacttgcttgcagaagtcgcaaaacatagcacagctcatataaagcgggcctacggggactagaccaatactaggttgaaaggatggagcgatgtgctactcaggaattcaatccagccgatccagtagtttgcgtatacccacggcaaaaatgcaaccgatttagctatgatcgtagatacgatggatctcttacattcgggcaacttcgatgggttctgcctcgtctctagtgatagcgacttcactcggttagccactcggatccgggagtctgggctaaaggtatatgggtttggggagcgcaagacgcctaagcccttcgtcgctgcgtgcgatgaatttatatatactgaagacctcaagtatctcccagaatttgccccgaattctaataaggtcgaagtgcctaaagcccgttctctaatttaagatgcccgatataatgataccccagatagtcagctgaagagttcggcagagatgagtctcgataatagtggataggctcggctatctgaggtcggcgagcacctcataaatcgatacccagacttcaacccctctacacatgggtattctaagcttagtgacctaattattacttccccttacttcgacattgaggaacggcctcctaaaccaggcgaagcgccagatttattggtccgaagacgaaaggcctctggtggaaattcgcaagtctgatttattattctggcttcatcaaataacgccaacgtacggagataaaattacggtattgaggtcaactgatcgaaatgtgggccgtctggcgggaagatgtcttgatgcggactagtgtgcttgaagtggggcgacggggataaaggaggagagattggagttaaaagtgattttgaatatcactgtactgtggcaattctcacttaagttcagacgtagtgtcttgtaagaatgccatcatttgccctaatacattcgagcactggaaatatttagtctgataccacttagcaacagccatccagttcaatatgtcctgttggtgaagttgaatggtcatttgcgcttcctagatagttaaatttcggcctttgatttcggcttccgcttatcttacagcctcttcgaagtgagatactttggcttcggccgccctaagtttctccacgagactgaggttttcagattgtatacgagcaatattttcaagatccgtttgcttttcgcgctataagaacccttataagttcaatgaattatcctaaagggttattgggtttacctttgcaggaactgcacgaaacgtttgacctacttcgcggtgaagctgtatgtaggcccctaccgagtgtttactcatatgcttctgaaaaagaggcttaagcgatggatcatctatctgccatgtatagagacattcgtcctctgtctttaatcggacctcggaagggtctactttaatttcgagcctctcaactggtcagagatattagtatgtttaatttaaaaaatctgtggagcttacatatatgctgagcgagtcgcgtcctgcaagttgatcgctaaatagcccgctttttattacctagaagttgaatttgttcatccatcacggtcgaaatcaggtatcaatgatagcacggcttagctatacgacgtgattgcagtcagcaggactgaaaagattggctagttgagagccccttccccacctaaagcgcagatccgtgcatttcataataccctcacaccccccaggtctctggcaagaaatgatttcaacctgctcgtaagaatcacctccattccgagccctcggaggggaccggagaactttcaccagtactaaaggacctctgaacgtcagcctaccaaacggccaaaagcatgttaaagtcattggtgcctaaggcatgaatccactcgagccaagggggtgagtaagctggtttacttgagggagataagagaataagtgccaatttacagtgtgtgtgtatgtgtgtgtaattcatttacgctgacccctcgtcgaaacgatatgcagcctaccgctactatatatatcttcctatgtacatgtatcgtgtaccacttcctaagcgaacttggagcctcgccgaggcctgccgtggcctctatgccgtcgttgtgtttatgctgcccttatggcgcgcggctttgaaaccgttgcgatgcttcagcaaaatccaagacagcctccactatcttggttcgtgatgcactgtcaatcttacctcttccttcttctcctggacactgtacagtaagagtcgaaatcagattcccctttaggcacacaccccttgtttctcggctcgtatccgaaaccacgctattccgtatatagacaaccctggtaataattattttctaagcatagattcttttaatactaggacgacagcattacgtatattattgtaaggtacccgaaactctgatacacacctcctcaatgcccctcctccatactcttgttcccttcctttgcagcaccactatcttgcaaattgctacatcctctgcccaatatggcaccgagactacccccatcaaagctacagtttattcatgatatgatgcaaagccagtcactaaccacatctcaaatggctgatgcagctgaatgcagcgaacgatgaatatccgcaagaacttgcggctattcgggaatgtcaacgcccccccaaatcgtgtcggtcggagacgaactataaccccactgatgatagaagctctccgcgaccatctactcgaaaaacccggtctctatcttgacgaaatggttatattcttttgggacgaatttcggatgctagcgacaacctcaagtatcaggagggctctcacttttatggggtggtctaaaaagaccacgcgacagagggccaaggagcaaaatgcggaattacgggagttgtatcttcataatctctcagaatttgagtcataccacctagtctacgttgatgagtctggttgtgacaaacggattggatttaggcgaacaggctggtcaccactcggtgttgccccggttcaagtatcacagttccaccgtgatgagcggtatcaaatattgcctgcgtatgcccaagatggtattgttttttctcgcatttttcgcggttcaacggatgccactgtgttcgaggatttcatcgatcagcttcttcggcactgcggacgatggcctgagccaaaatctgtcttggttatggataatgcatcattccaccactctggacgtattgcgcagatgtgtgccgatgctggagttaaattggtttatctccccccatattcgccggacctcaacccaattgaagagtttttcgctgagctgaagggcttcataagacgcaattggggctactatgaaaatgacccgaaccaagtatttgattgcttccttgattggtgtattactacggtcggggcaagggaagaaagtgccaagggccactttcggcacgcaggcttgactattgaggatttggatacctgacaattcgtttctggtggcgtcatttcattgagcgatcgcttcgcattgagtgcgaaaggctgccacatcttcgccccatatcgcgatgtatgaactagcgtaaggagagcattcatggggaaatttcctgacccgagactcatgaaacagactgaatggggcttggcgctaaaccaatccgctcgatagggtgagggtgccccaccctattggagccggcgcttaaccagtagaatgagagatagatgacaaggcgcagcaaagcatttaaatcgcaatcatttcccccaaccgcgaacgataatttacctcatataattctgcaagctctcatgaagacatcgaagggccaggctctcggttacactaagcaatttcaatttcacgtttgtcaactccatggctgaagtagttggagtagtatctagcgccatcacattcgcgacccttgcaatccaggtcgggaagtccgttcagacactgaaagactactgggatgcaatacgcgacgcacctgatgatctcaagtggctagtacgagagatcgaagtgttcggctccataatggctgatgtcgacgcggacctaacacgataccctcctgcattagccatgataaattgtcaacatgctttgcaaagcttgcaattctgcaaagaggccgtggatgccttgaacgcgctttgtgaggatctagtacaagatgtcgactcaaaaaataggttgcgcaggtcctatcaagctgtcaagatagtgctacgccaacggaaagttgagaagcacatttcaaaactacataatgtagtccgcctacttatgctatcacagcaatgctatacaaggtacctatccactcaagatatgacccatggatcggggctaatatatgcagagcactcattcaagtccaaccagatttaattgcggagagaataagagagcgtgatgttatttcctcaatgacagaaactataaaggctcattccgaatcgcacagtttgtcttctttattacttgcttatatttgattgagctaatatgtttggcagattgttgtttagacacaacgggaatgccagccggaacgtcgaaaagaatgacaaagagcgatgctcgaaaaagcagttctgtttggcgtctgagtttaccatactggatatcatctcaggttttggagatatgtggcatacaagcttctggcggatgggactttacgttccgaacttacactgaaattccttggaatgctggggttgacagattagtcagggaagggaagatagaaatgcttcggaatctttttgcctcagggcaactttcagctcttcaccgaaatggaaaccacactctgctccatgtaagtttccaatcactgaaaaattccgtcccccatatgcttaacgagcaataggatgcggtctgccgagacaggaatgaaaaggttgtggaatttcttcttaatgaaggggcagatccatttatcgaagattatccacgccggttgactccccttcgtcttgctctatggattggaaagctcgcaccatcgaatgaggactatccgcttttaccatatctacgtgttttactcaaaaattcaaaagacctcgtctatgggagtccccaagatgtggtcaacggggtactatccgagttttacggatcggatgaggaattcagatttttgcaacaacactgctgtccctggttctacaaaatgccgcaggcgacccgtgtggaggtggctgctcgaatttcattcgacgcttcaggtgcttgccatattcctactttgatccgtgctattcttggtacagaccctttggaagccaacgaacttcaaacgaaatgttatttgtctatgacttcgagagaaacgacgctcgctcattgtgtcgcaaaacaactaggcagagatctaactgccttgagtatgtgtcatcgaagacagcatcttgtccttccatatgagtaccagacattcgtgagatacttgtcagatgatcaccaaacaacccgacaaacctttcgcgactcatggagcaacctattcttcgatatcttgcgcgctggtatagatatccacctagttgttaaccacaaaactctatttctcgcatttatagagggaattcttgcgtggcaagtatctttttccaagtctattcaatgtccgcgcgttgatacgggagtcttgaattcagttgttagagcctggctaaaggatcttaaagctgctggggtgaaattggatcaatttggtacaaacgagtggtgcacttggagcaggggggatgttcaaagggattttgttggcgatgtattgcgtgtgactggaatgagctatggcacatcccctgatgactggtacatatggctgtcggaggcatctgatactttcgcggcggagttctggaccctgattgcccagccaattgtgacaacaccaggtgaatggccagaggaatagctttcaattcatcccataggaagacggccatctcatctaagtagagggcaggtttttcggctaagtgttcgcacagtgcttctagcaccgatggcgttatggttcgtcgccgtgtcatcgactctggctcttttattgcgagactttcactcgaagtgctctttgcagcttctcttccagcaccagccgccagtacgcacttggggtcaatactaggtcttcttcagtgtccttcacgacagccttattgttgagggtgacccgccattctataaagtagtggatacagcttggcggatcctcatcatagatcttgtctttctcccactcagattcctgaagcattggtaaagtattcggtcgagatcggcttgctggagtggtctcatcgtcgagaagcacggaaggggactacaaccagatcgcgtagcataagggcttcggaagtgtcccggcatatagtgaatcctgctcccattgttggaagtcttggggctgagagatgcagtcaacgtgatacgggctgtcactcatgtttaaacccaatcgaagctctggagatctgtgtcagcttacgtgaggaccagctatcagcagacgccatgaacgaatagaaacggcagtagcacgtagggccgatagggtaacagaaaaagaaccatacttagcctaccagggttagttctctacagcagtggcaatgccttcgtcatgggaggagatagatatgcacgaagaccatggagcgaaaggaaaaaaagctggaagtggatcaggccacatcgccggatctacccccgcccccgccttcccttcgagaacgttctgtggaaatttacggtattatacaatggctcatctgacgttgaaatcaaatacgttaagagatgccatacggctaaacaggggttgtttactgagtaacctattatggactagcgtggtttcgggtacgggccgagaaataatgcgtgtgttaccagaggggaatctgttttcgactcttactgtacggtaccagtatagctcgtacagtataaagagtttcgggaagtactgtagcttgtctctcggtactttcatcaggatttcgagcgcgtctagtgagttactgtgaccaatggcgggacgggccgcgatgcgaacccctgaaccgcccgactgtgacgaacgcgaagattcgccaccgcgactggcgagaccgaaacgcaccactcgaccaccgaacaactacgctcgtgagcaggaaattgacactgatcgacgaaagacgcgttcccagcaaaaggagagaattgagctaggagaccggcgtgacgaggtaacttcggacgacgccgcgaccgagcgcgaagagctcgacgtcggcggtttggtgagagagatcgccaaactcaggcgagagatcagactccgtgacgaaatacacaaggaagaaattcagagaaccagagaacagttcggtaccgccctcgcggaggtccgacacgagctacagtccctgacgaatagaaacacgacaccgcaatgccactctgagacgtgctctcagaacaaccacgatgcgatcctgcgcgaaatccagtccttacgcgaggaaatcagtgttcccgctgttgcaggctctccttcctacgcagatgtcgcgcgcactccgccgtccagttacccaagcaacatacggtcccttttaacgctgaacacgacacccaccacctttacggacacgctattttgcacgatagatacctcgaagatggcagaaaaagggacaaaatcgacctccgcaggctcggtcagagcagcggttgaggcagagatacagttaacagagggccacgcgcactggcgctgtcgcgctgttaccgttgacccgaaaaacgccaaccggatcaggatcgcctgccgggatgaggatgaacagcagctggtcaaaaaggttgcagaacagaaaatcggggcgggagctcgggtcctccgtgacgagctctacccgatcaaagtcgatagcgtcaacaagacctccgtgctagacgagagcggtgaggtccgaaccgaggctgcagcagcgtttagtgaggagaatgagaccaacgtagccaagatttcatggctgagcagaaaagagagcgagaaggcctacggttcaatggtggtttacctgaccaaacgcatcgacgcgcgaaggctcttggccgacggatttttccacgcggggggagaatctggtgtgactagtgtcttcgaacaccgaccgcgaccgacacaatgttacaactgccaagagataggccataaggcattccagtgcaagaacgcccagaaatgcgcgaaatgcgctacagagggccatcgccacagcgactgtatccaaccggttccaaagtgtgtaccgtgcggagggcctcacgaatcgtacagcaagaactgccggaagctctatccatcacgtcatgaataattctcttcgaataattcagctgaacgtgaggaagcagggtgcagtgcacgagagtttaatgaatgacgaagacactcaaaacgcggtggcgctagcgatccaggaaccccaagcgaggaggattcaaggccggctcttgaccactccaatggggcatcacaagtggacaaagatggtgccctctacctggagggaggggagatgggcgattcggagcatgctctgggtcaacaaagaagtcgaagcggagcaagtccctgtggagtctccagacatcacagcagcgatggtcaggctccccgagcgactgatctttatggcatcggtttacgttgaaggaggcaatatctcagccttggacgatgcgtgcaatcatttacacgatgcgatcacaaaagtacgacgagagacaggcgccgtggtggagattctgatggtaggggacttcaaccgacacgatcaactctggggtggagacgaggtgtcgctgggaagacaaggggaagcggatccgatcattgaccttatgaatgagtttgcgctcagtagcttgcttaaacgcggcaccaagacatggcacggcggcggacaaagtggagactgcgagtctaccatcgatctcgtcctagcttcagaaaatctgacggactccatgacaaaatgtgctttactcgagacagaccacggctctgatcactgcgccattgagtccgtgttcgacgcccagtggtcgggcccaaagcaccaagagcgacttttactgaagaatgcaccatggaaggagattaacgccaggattcagaacgctctagccatccttccgtcggagggcacggtacagcagaaaacggatcgactcatgttggcagtgtccgaagcggtacacgctttaaccccgagggcgaaaccatcaccacatgcgaagcgatggtggacagctgacctcactcaactccgtcatatatatacgcactggagaaaccgtgctcgctccgagcgacgggcggggcgaaaagtcccccggctcgaaacgatggcccaggatgcggccaaacaataccacgatgccattcgcaaacaaaagaagaagcactggaacgagtttctcgcagacaacgacaacatctggaaagccgccaagtacctcaagtcgggagacaatgccgcgttcgggaagattccgcagctcctcagagccgatggaaccactacgaacgatcacaaggagcaagcggaggaattgatatccaagtttttcccgcctttgccagagaacatcgacgaggaaggagtgagaccacaaagagcgcctgtggacatgccagccgtcactatggaggagatagagcggcaactgtcagcggccaagtcgtggaaggcacctggtgaagacggcctaccggcgatcgtttggaagatgacgtggccctcagtcaagcacagggtcctcgacctctttcaagcctcgctgcaagagggcacactgccaagacagtggagacaggccaagatcataccgctcaagaagccgaataaagatgactacaccattgcaaaggcatggagacctatctcactccttgcgacactcggaaagatactcgaatcggtgatcgcagagaggatctcgcacgcggtggagacgcatggactgccgccgggggagccactttggggctcgaaagcagcggtccgcagagcaagcactggtgttcctgcaggagcagatctatgcggcgtggcgcggccgacgagtgctgagcttgattagcttcgatgtcaagggagcctacaacggagtatgcaaagaacgactgatccagaggatgaaagcccgaggcataccggaggtcttgcttcgttgggttggggccttctgctcggaacgaacggcaaatatcctgatcaacgggcagttatctgagactcaaagcttgccacaagctgggctgccgcagggctcgcccctgtctccgattctatttctgtttttcaatgcagacctcgtgcaaagacagatcgacagccagggaggagcagtcgctttcgtggatgattttaccgcgtgggtgaccggtccgactgcgcagagtaaccgggaaggaattgaagccatcatcaacgaggcactcaactgggaaaagagaagcggagcgacatttgaggctgacaagacggctatcatacactttgctcccaagatgcgtaaattggaccatgagccattcaccatcaaggggcagacggtggtacccaaagaccacgttaagatcctgggtgtcttgatggacacgagacttaagtacaaggagcatatcgcgagagcagcgtccaagggtctcgaagcagcgatggagcttcggcgactccgaggcctctccccagcaaccgcgcgacagctattcgcatcgacagtagcaccagtagtggactacgcctccaatgtctggatgcacgcgtgcaaggataaagccatggggccgatcaaccgagtccaaagagtaggcgcgcaagccattgtggggacatttctcacagtcgcgactagtgtcgcagaggcggaggctcacatggctactgcacaacgtcgattttggaaacgagccgtgaaaatgtggacagacatccacaccttgccggaaaccaatcctcttcgccggtgtacagatcagatcagaaagttcagaagataccaccgctcaccactgtatcacgtagccgatacgctcaagcacatcgacatggagacattagaaacgatcaaccccttcacgctatccccgtgggcggaacgcgtacaaaccgacattgatgagcagcatgagtccctggccgaagcgggcgggtgcatgcaggtcgcggttagcagctctgcacgaaacgagctggtgggttttggagtggccatcgagaagcgaccacctcggaatcggaagcttaaacacaaagcgctatccatcaccttggctgtaagggcagagcagaatccattctctgcggaactggcagccatggcacatgtattgagcacggcgacgggactgaaagactacacgatcgcactgctcacaagcaacaaagcggcggttctcacactcaggaaccctcgacaacaatctggccaggagttcgtgtgtcggatatacaagttgattaaaaggttgcagagaaacggaaaccatgttcaagtccgctgggtttctgccagtgaagacaacaagctgctaggtctggctaaagaacaggctagagccgcgacacaagaagatgccctcttgcaagaacgcgccccgaggataaaatcaaccacgctgaatctcgcacggtctcaagcagtccccagaaataccctgccagcggacgtcggaaagcacgccaaacgagtagatgcagcactcccaggaaaacacacgcgacagctgtatgatcccttgtcatggaaggaagcgaccgtgctagcccaactccggacgggcatggcgagactgaatggatacctctatcgaatcaacgcggccgacacggatcagtgtgcgtgcggacaagctaaggaaactgtggagcacttcctctttcgatgtcggaagtggaccacacaccggacggatatgctacaatgtaccgacactcaccgaggaaatctgcccttttacctgggagggaagtcgccttccgacgatcaaaagtggacgccaaacttagaggcagtacgggcctcaatacgattcgccatagccacaggccgcctcgaggccacttaaccccgccgacgaacataaatcacccctctttcattctaatctaacccaccaaccacctcgtgctattcacggtggacgcgcttcaactgccgaagataggatgttgaacacttggagaagcgccttcaagccagtctactaaccaacttactaacccacgagcatccgctgcgacactgcatgctgagaatgacaaatacgccaaggtcttgtgtatgggctccaatgagtcacagaattgtatatactatgacatgtatagtagtttagcgatagttgccctttcggctcagccgccgggcgttaatgaattgtgtgtgtgtgtgtgtgtacggtaccaatacatgaagtgatattccggatctacagtgacgatgcataacttgagcaccctttggttaccaccttccaagagaaacacaccgcctaaccaaatagccttaaacaatcatgccgatcaactttttaaatattggtgaggctagagcgggcagtattagggtgttcaaacttatgcaccgtcactgtatatcagtggtatatcttggcattagagtccgagaaccgattgaagagtgtaggtagtgacaccagtttcgggaggcaatataactgttctacattaacttctcaggaattattcgtgaacatttcatggatagatacaatacagatgaagatctaatagggaaaacactgtatgtgtagatggacgcgaagagaaaaagagagagggagcgtgcaggcaaactatccgggttgtgatgcctcagacacccaggcatccaacattcttctggagagtgtgtaaaagattcattgaaattgtgcgatcatatacgatctcctgtaagtaaaagacattcttatagactaatattcctagagcatataaaggactcagacaaagttttcagcttagactcgccatctgtattctatgtttcatgatacaattgatttctgtctttgaaatatgtatgtagcactctcctatcttgggctttcaggaactttcttaagtcaaagcctataagctaacactttgctaatttaagccgccgtaaggaaggtaaagggacagaggacacaaaccctagaaacccagggctttctatcagcgtcaagctctcaacttttgctaaagcagcctttgcaatttctaggatattatcatctttagtggctagtttggaatgtatcctatcaatctctatatatttcaaggtcaatcctgtggactgagtaatagccatacccctgagtaccgccttaaggtgaacgaaaagtgagtccctaagaaatatacgattggagaaccaaagaagctgatcttcctttgctccatggaaggagagcttgatagtatttaggttggagagatgccgaagtgattctgtaaaagtatggatatccgtccgctcttttaagagtaaactctgagctcttgtaagttctttaaaatatcgaaatattgccttgtaggaaaattgctttcctcggagctcctaccggaaatcttcctgatctcttgtatactcctatagtgtataaatgcaagtagaaaaatagtcctaatatgggatcactgaaaggattagtaaggagctagatgaagagctgaaaaatcacatatatggatcgactaattctgatgtatcataatgaagtattctcacgcattgtgctaatgaagaaattgcgagctcttttagtttctttatccctttttctgtgaactcgactttgaatgtatggaagatatctgaggtgctgaccgatctgtatcttctatttatgagtgaaaacgatctcaaggagtagtaatcgagatcaatgataatcagtcttagtagctcgaaaggtagatccgtgaaaattgtcatgttactttgaagctaggagagccttgatataacttatcgaagggtgtaaagaaagattgtacctgccctagggtgaaataagtattaattctcgtgtagctgggactctgtggtaaaataatgtaggaaagagttgcgacactgtttctagtacaccggtctggctgctagagatttgccgctgatctttacaattgctctcccacccgggccgcgacactgtctcagagccgcggcaaaatttctatagagcttgacctggtttggttcatgcctacagtcgagcccgtcgatggatactggctattgaggacagaggtctgagctctgtagtcgatgcctgtaggtaatggataagagagcccaagaatcatgaggccaagaatcatgaggcgcctcggccgacctgagaattaaagcaacgagcttgtagtcggagaaatcatgaacggacctcaagtgcgtacctctactcggttgtcgtgactgtattttggaccgtgggcgaattactaggcaatggacggaggcctcagatgtagcgcgttatgggtctatccatacgtttttggacaagaaacgaaatcggatttaacctaaatagttgtaatatccaatgtgagcggaattttacctgccgttggtgactgggaccgttagtgtaataaggttctaattgagtggccgggattacccctttaggatcgccaggggtgtaaaactttaataaagctcggttcgggcggtttgatctgtcttagtgatatgcatgcatacggcttatgtcactatgattgagtctctttgaggatagggaaaagcccaggaagaaaaggaggtgaaagaaagatttatctcttatatttgatctactatctaacgtgctggggactggttggaggtaggacgttattgtaatgaaaggttcggaatgggccggtagcttctggtcctctatttaggtagtgatcttcgtttaggtagtgatcgctataaggctgcctgatctgtcctagtttttactttcggggaacacggaatgttgaacgccataactttgtctaccatgaactgactcgagatgtggtccctttgtatctagagatatatagagctatagatacagcacttgttttgggttgagacctttacttaggctagttactagtgatggaaaagaatattcttatataaacttggaggaaatgaaattgaggaacctggcgcagcatgtaaaatcctttgtctaatacctcagcccttggtggaaggtgtatctgtgatgattttgacattcgattcttctgatgaataaatagaggacctaaatagcctaccttgacctgcgttccctttagggggttgttgagataactggtctagagtagcctgaaggtcttgtacagcctgttcatgtgcgtggaggagagactgaagacaattgatcaactctcgctgacgttggttctctagtagaaaatgctctattgtttccttattatcgatatatccggactcctgcttgtattgactcaatcgctgtagctatgaattaacagctgggtacaacttattaagatgggactcgagcccttgtactttgtctctttctaaatgaaggctttgggataacacttgataggtttctgtggtatgacgtagtgaagcctcaagctgcgatttttgatgctgtatcctagaaagcgaccttttgtaatagatatgtaatttttgatatgccacggaattgctgttgatcctgagctccaagagcccctggtaatgctttgactactggtcttggtgtaacagcttctctaccaagacaaagacgtcattgttatattttgcggtgtttgtattgtcctagatttttgaaacagaatcagcaaatgttatatctactgtggataaaaagtcggctttactcgaagaatggcagtagtagatggcggagctaccactggattttgatattgggctttagaagatatgtcttgaagaattggcttggcctttatcatataataaagacctgagggctcgtttcctttattagtggctaaacaatgtagggtgtgacgatacacagctaaccatggtatttacagcattcagtgtcgcaggaattggtcggtgtcgcaagttgttttcagtgtcgtaagttgtttttagtgtcgcaagttgtcttcagtgttgtaagtcttttgtcgttttcagtgtcgtatcttgtttttactgtcgcacggagagactcgcaggtcttggcaagcgcggtgcgccatgggttggtgcgaggtggatatacggatgtgcacggcaacgaacgatattgcgtgccttatgacgcctgtaaatgaggcccaaaattccggctagttacactgtgtcggcctgattgataagtcaactgtaaatcatctcttcttttctaatattaagaaagtgatagtttggttgctatccttgtatctatcgataaaggcgttgctattgtgtatttatggagttattttcatttgtcgattctaactataacacttgtatattattggatgaaatcacgtggtgaaattaatctaaatctatatagctatagagtggggaacctaggtgggtattgaaatcgatgcactggcatatacgttgaggtatattttgtgtcgtaggtggtgtcatattgccctgttaattattacctctgcttgcgttaagaggtgatagagggcattgtcaatatcgtccttttaggaatggcattgcctcccgctgtaagcctcctttgatctctttaatatttctgtaccaacctaaagggcgaaactccttatctatggccctggttgtatttttatcaaatacaatgagtcgatatactggttaatgtctcgatcccatatctgaggagattactcccgcggaccattaaattctatgtcttggaggcatattgtccaacctcgagagactacagtcccggttgtaatgtgcaaagcgacaatcgctagatttcaagacccagttggaagaaactgcttataagatgggctatctcagagcagagcttcagtggcataaagagactaaatagatactcttgcagttctaagaatgggtatttgatatctttagctccctagaagacgctcttatataggcaaccgcgcgcctgcacgagtcggagtagtaatacctaatgctttggggatctaattctagaagtggagctgggggctgtttttgacttgtcaaatgtttcaggttatgggttggacttgaaggaatttgagctgtgggatctactgagtgctgtcttattgttatagtgttgggcttctttttatctcttctagagaatatcgacgtatattatagaaattgcaatgtgctaggtaatgctatatttcttgctgatggtagcgatttgccaagtcaccaaattccttcattaccatctattctcgccttatgaccttgagtagatacttattgacagttttgaacttgtcctctaagctttccgttccctgagataaattatctatcctgtcctttatactgtcgatgctctgctttatactgtccaagcggttccctatactgtccagacggcgttctatattgtcgaagcggctatttaggccttcgatattgttactcagcgtttgcgagagtgcgctaaattggcttatcgtactcgtaaatcgcttgagggtgatagatagggcttcatccgtatgcgagatagtttcaatctctcttgggccttgcggacgacttgaggataataatgcatcgacttggctgccattttgtcagccctagttgggacctatcttgggggaaggataccttatcctataatcgctcccgtcccggtacaggtctgtcatcggagcgaccctagacgcttcccggcacgctttagactcaaaaccgtcattccccatgatcacgtcctgctgctgaacgaaagcgctcaatacgttgtatgggtcaatgtctgcttgtgtgcaatgcatcgtttcgttggtgccaagataatgaaagggatcatacgaattatctgggacgtcgagtgctagcgacgcttcgtagttatgaccgtgcttgttactagatatgttcagggcgaggtacagaataaaaattggtctcggatgcggcagacggatcttatatctctctctgctctaagcgctggacttccaatgactaggacggggccaccaactgttgggtaatgggagcactttattggttatagtaccctgttgttgttatccctgttcgacttttgcctcttggacttggggaggcgagagtgggcctagacaaaagtacgtagtccgggatctataccagtaaatgggagccagggtgagaatggggtgagaacggggtgagaaggagattgtttggttatttactacaaatgtgaatgaattatcaccctagttatgaaataagtctgttatttgaaggagtaatatttacatataaatatctcgcaccatgagacatgagagaagtagattctttatctttatttcactatgcaaaacttgatagatattggctggcttgatgttggcgcccgggaagattccacgtttgtaatctaagataacggccggctgcgacgtgtaatctctgagttgtgtgactaagataggcaatatctattattatgtatattcctcggtgggaaaacgaagaatcacactcttcagcggctctaccctcttaataacataaaaaggtatgattctgaggctctaataaaattgcgatacgatgtcgcttctttataaagccggcggccagtattgctagctgatggtgatatcctgagcaccgacaaattgtaccctataaaaagacttgatgccggcgttggccatccagtctattggaacaactatttagcggctaaaatactactggtgttatagtcatagttgatatttgtctttacggatgtagtttgcatctttatcgacgatgttgcttgtcttgaaaaggtcgtgaactttcttgtcagctgtttgcagcttcgttcgatgtcctcattctcatcctagcatttactaagggcgatatttatttatagcctatcggtgataaaagaaaggggtgtgtctggtttaggattactttattggagaatctaagaaagcggatataatgatttatctgggttgttctctagctctatatatttatacctataggataataatttctctgatatcataggattctaataaatcaaagcgtctatcatagaataggtcgacgccatttcctttattcgataagaaaaccgagttcggccgaatgggacgcatttgatagcattatttcaagcagcgatccaatatattctagaggatatctcttatccgtttgatttcgtggaagctactaggaaggatcgccctgttagtttatacgcagagctacatttggcgtattatcttgagatcggccaccgcgccaatctcctactctccggattggccgccaccattttgtccgcgctttttatagaccactatgttcccgagatgcttggttggtcctatctcaactttttataggctgaagctgatattagatagctataaacccctgtatggtatttagaactttatattggtctattattattatagcgtattgcagttccaaggcactatagcctaatgtatatcccgccaaagaaagtgatctggttgagttttatttttcgcgcttatataagcgattctcggagaatgcagtctccttagcgaatttacgtaaagaagaactcaagtcctttagtggccagttatattgtatgcgaagcaattgtatttgtctagtctaccttctacgttctatataatatattctagcgtgtggatatatagtgtgcgaccgctgtatctagattttcggaagccctacctctgggctggagtattagttcacaattaagggctatctctattacctctactagaggccgttagtggtagatattcttccaccgactataagccctataatccttaccatcgatggtagtggagtaaggggggtgatcctgttggagttcctacttctggtataggaatatctacgcctgtgcgcgatataagatgtggtagatcttgtactcggcacaagtttaggtaagttagtaaccttatggtgtaaatatagtttttccagattaggaaacctaataaaggatattataggtggccttatcgcccttaggttattcgcaatgatataggatgttatgtattacttggagcgatttaataccttagcatgtcgtattttccataaaagacgtctctctatcttacctctactgcttcgctaggtatttggctttatatctatctttggggacatggccaaatgggtcaaatagctcctatataacagctactatgattcgcaggtcttcgatgccgccctaaaaagtgcctttagagagcgttgtcgtatttttagtgccacctgagaagatccaccaggaccacgatgctccggcccgaaggtcggggtagtaaccacgagcatttctagggatataagtacttttgtgataggtaacttcaacgtggcctatgactcaggggataaaaatggcaagttcgacgatcatatctgcctatgtttttactaatataactagacttccgaataatacgtctagatgatacttgaaatgaaccaactatgtggcgaatgtaggcctaagcttagcatataccctattttctatagttagtgctaactaaaatctagagtaagagctaccgccgcggctctgttataagtcgatctcatatattatttcgtgtgagtggggctgactattagatcacaagcttttttatgctagcggatctatagggaatcggttccttttaggatagtggactaaagtacaacttcgcgggagagattgcacactaggtcttgcactaaatctagcccacagccatagggtctacaagaatactgtcattgggtactagaaaagtgcagtctaataagcaaaccccgtatttccgccacatcttttgtaacagtttcgtacgttggggatttgatacgtggatattaaccatagagatagatagtgattagagaaaatggcgaagccgtctagataattctattaaaagtaacagttactgtctagatgtgcctttaggaaatataccttataccattgatactgtcgaggttatagaggactatcgcgatattatcatcctctatattagtagtggacgaatagcccgggatatggtaactacactacttatctctagattcttctttattgtcgacttattgctagaaaatactgtaactccattctggtattgcggatcagtgtattataaagggccggctcggatggtgatcttagctttagaaaatctctaccctaataggcttagctatatcttagattgtagattaattgataggtttaggggtctggatagtctctaccccttgtatagatactacagccgctccgttactttcttagcctgccatctagagtataaggtgaatatatatttccagaccagttctaaaaagcgctagaggattagcggcttcccagagagtatggcatcgtttatttcacgataaggcctacggtcttcgtttggttaagacaaccataggtatccctgccgataaccttgccagagctatgacgtgatccgaaatcccgtcaggggtaggagacgtaagcgcgaatcaagaggctccggagatgtttatcccaggaaacgtgcacttgtttaaatcaggatcaaacctagaatttatttatagcgtgttcgataaggaaactctcgggtataaatatgagtccttttttgtctatagcaaaaacttgtaatgtccatgacttataaaatttcgttaccccttttcttgttctaggttcttttactaaatgatattgaagtcatgggtggccccgatccttataggaactcctgagttaaattcgcaaggcggtcctatacattgaaagtcaaggcctatgagcttgctaagttctgcgatacggatatctatgtggttgtcaattatcagtgaggatcgtttgtctataacttagtcgaggatagatcatggccccctaatgataagaagctagtgagtaaaataatgcctaaagtggcttagggtttcggcgctatcaagctaagagactggtaggaatagtagtatcccaatctggaacgaatgaatttcagtaaaatggaaaatctgccagaaagcccggagagtaatttatcttggctcacttgatatttcgccactaggttggagtattttcgattattagaggatctctatagggacatggatctagcaaatgttgttgctgatgaagaggctctatagatcaagtctggtgaatgtgattaatagaatatacttccttttataatacgataaaatatctgctaagattttgtagttacttggaagatcctaccttcactgtttatttactaatttaatcaagcggaacgaaagttagtatagtatagaggggagaatagatggtgcgtaccctttgtgttagattatactttgcttttgtgaaaataagtcaagctctagttgatataatctcttgtgagctgttttagatgtcgtaggttttcttaaggaccaaaggctaccctctattttacagcctgcccagcttacaattgcgaatatggtaactcagtctcctagttatccggatactcaagtcgttggttcgacttacgagcccttcgaatccagttatatgcggatgatcatagaagtggacggaatttcctagtaagataacgttcttgctagtacagtacactggatacttcttgctggatatcttgtgatacctggaacgttcacatctctctaaaagtccgacaccatctataatagcctcgccgataatgaagcaggggagtggattttaaatactattcagaatcctcctcttctcgcaatggtatgtgtactgtttgtatcaggcttggctattatgagctggctgttctgggaatattggggaaattatatttggcttaccaatcgaatctttgtgtgagtatcatctatttattatacgagaactctcttaattatactagtcccatacttcttaatgccttagctggctttcttactacgattattagcctatatactgctcacgatggcgattggtctatcatggtacttttgactgtgattacctctggtctgtccgttgcctgctccctcattttgctatatatttataaatttggcaaactagagagattgaaacaagaacacaatctgatgtttcgcaactacgaacaccccctccatgtctgagagttattctttctctatatcatgttacaggatggatcgaaattagtttcaccacctgcacacggagaatctatctcggaccctctcttgaaacacactatacttattacagttactcttcccctgaacccgtgtcttggcagtaattcaatacacgtgtaaataatagcttaaaaatagcttctgtattagacctgtatggctcttaggcgtctagaacgtttaccctgcaaacaggccaaacacaaaggttgtctgctcttctcgtctggagatgtggccagaattcgaatcccactcccgtcaaccacgcacggtagtcttggcgccattttggaaaggaatagctggatgtggagggaccttgggcagggattagtgggagttccctaaaaaggtgcgacgagcgaccccatatgctcacccttgctcacccctctgctcagcgggcaggggaaataatttagggtgatatgcctggggaatggcaggtattaggagatgcacgtgaccttcgatcttgtaggagcctagcagaacatctgacctcagaaaaagatggcaaagaaatggcacaccttccctcggttatgttatgtaatcaccaactgggatccaatacttcttttacttgctgggcgaagcgatctcttcaaccgagaagggtcagacattttatccggaaaatgctggctggttacatgctcgatctgactttgggatcgggtcgtcccgtcctgggaacgccattaccggcccccacatggaagtagcctcgttacaaacaattcagtaagcggtgtggagaccagaaggcacacttgatctgcctggctgagcacgctagagtcacatgatgacgaggctgagggaattccccctcttttagttcgttggagtcctactgagatttccgtcatgaccaacattagaactttctaaaaacaaatactcctcagcgttttctgctagacgagatagtatttgacacatcgcttactactatatctcgcgcatccgggcattttgttagtcgagcttactacccaccatggctgagagttcccaatctcagccagagcaatcagtgtcagggcaggataaacccggtcccgacagaccaccatgccaaaagcgactccaacatgatgcatataccattggatgggtgtgcgccctcccaaaggaacaaaccgcagccagagccatgctagatgaagagcacgaacctctcccgatccctcgaaatgatcataactcgtacactcttggctcaatacgcggccacaacgtcgtcatagcctgtctgcccagcatgggaaccaaccctgccgcaaccgtcgcgacctctatgataaacacgttccaatcaatcaggttcgggcttatggttggggttggcggcggaattccgccaaaggtcaatctgggtgatgtagttgtcagtcaacctgttgctgactatcacggggtgatacaatgggatatggggaagctggaacgggatgggcggtttgtccacacgggctcgctaaaccgacccccgaatgcgctcctcaacgcgtcgaaccagctgaaaagtaatcatgagatgtacggatcacagataaatgagtacctgattgatatggaaaggaaatttccacggctagcgccaaaatatacgagatgtaagtgcctgcaagacccgttattggtatccgagagttcctggtctccgagggaagtctatttcctgtcttggttgtgggagccgataatcgcaattatcgcatatcttcttggttcatgggccattgatctggtaaacgaggagaatgtgcggttatcagatagggcagacggcgcaagggccccaagagaagtcagggtacaccatggcctgatcgcatccgggaacaaagtgattaaggatgccaaatcccgagacctccttgacaaaaaatacggcggacacttgctatgcgtggagatggaggcagccgggctcatgaatgacttcccatgtattgttatccgaggcatttgtgactatgcagactcgggaaaagaaaaaacctggcaagaatatgctgcagccgtggcggctgggtacgcaaaggaacttttgggatgtgtccagcccagtgttgttgacgctgaagattcagcaaaggccatattagaaaagggttagtgcctacctacctaaatctatcatatacagctgtctaagtaccaagaaatacccgagacgtataaactggagttcgagaaatattctgactgcaaatagtacatcaggggatcgaaagcgtacagcggacaacagctgcaacgagagctactactgattcaatcagatctgaccttcataccgataagatcaagcgctggctttgtgctccggatccatcgtcaaacatcagccatgccaggacgctccgccatgaggggactggcgagtggctgctcgaatcccccggtttccaagcgtggcgctcggggtcacgtcgacatttatggctgcacgggctcgcggggtgtggaaagtcggttcttagtgcgactgtgcttgataatctcacgaacggaaacgacggtcttatccttagcttcttctttgactttagtgacgccgcgaaacagacattggaaggcatgctacgctcgcttgctttccaactttacgacagcgggctggactctgccaatcatctcgatacttcgttccaaacacaccgagatggcagcgagcaacctacgacaaaggtgctctggggtgttgttttcaagatgcttgtagcccagaaaaaggtctctattgttctagacgcattggacgaatcaagaacaagggaagctgtactcaaatggatcaaggacatggtattaagcccagaattggtccatgtccagctccttcttaccggtcgacctgaatccgagtttctgcgcgacatcccccccttgatagggaggcaaaactgcctaccacttgacaagcaagctgtcaactccgatatccgatcgtgggtcacagcacaactttctcaacggagtgattttatacaaaagcccttgtctcagaaactcctggaagagatccggaaaaaggttggcgacggcgccgacgggatgtgagatattactgcttcggtcaatatatttatagcttactgacgacttcatcaggttcaggtgggcattttgtcagttagacagcctgggtcaatgtccttacgaggaagctatagaggaggctctcgaatctttgccacaggatcttgataagacgtacgagcgcatgtttgaaagcataccaacgaagcttaaaagtgacgctatacgactccttcagttccttgtgcactccaagcgacctctgacgctggccgaggttaaagaagtaatagcgacgaagattgaaaacgactcgcaagggttttacaagaaacgtcgattattttgcgagaatgaaattttggcttactgtcccagcttagtgacagttgtccatactgatgttgaagagttatatcttgcccatttttccgttaaggagtaccttctggaaaacgattgtttcaagactgtggctgccagcatttctatcacgaggacgtgcttggcgtatcttacagatataaacggtagcgaaagagagatgatgtagcattttccgatggcaagatatgcggccgaattctggacctgctatgctacgacggctgaggcccacgaggagattcttcaaataatagtcaggttcctagaagaggaagcgacatttcagcgatgggctcgtttgcattaggctgataggagttgggacaaaagccctggtgcgccgcgaggctctaggctctactatgcttgcttgggtgggcttgtggaacctatacggaatcttgttgacaagggagtagatgtcaacgcgcagggcggcatgtatggaaacgccctccaggctgcctccgagggaggccatcaagagattgtcaagctgcttttgaccaagggagcagatgtcaacgcgcagggcggtgactatagcaacgctctccaggctgcctctcatagaggccatcaagggattgtcaagctgcttttgaataagggagcagatgtcaacgcgcagagcggtgactatagcaacgctctccaggctgcctctaatggaggccatcaagagattgtcaagctgcttttgaccaagggagccgatgtcaacgcacagggcggcatgtatggaaacgctctccaggctgcctcctttagaggtcatcaagagattgtcgacctgcttttgaacaagggagcagatgtcaacgcacagggcggcatgaatggaaacgctctccaggctgcctcctttagaggtcatcaagagattgtcgacctgctccaaaggacaggcgctattacaatgccttcaccatagtccgcctctacggctcagaggagcctagccgagaaagcttccctcaaacactctggaccttccgatcacactttgtaaattcttctatgtcacttctactatgtatagtgttcctctatagcctagcttcaagcctcatcactattatcatctcgaaaattttcggtctccatattttgatacataactagtaagaatcccggatactgcgttttccaagtacagtaatagtccattttcgccccgatatatattgcatcagaaatccatatgttaaattaaggacactcccgctaggacccagacacaagatggaatcaagattgcactcaatctatacgacactcaaacaccgtcgacaatattcttagtctacctaagaaattgttacgtaaaacggatttgatcataagtgatgtctcgaaacaagtcggcgtcggctaatttgaaccagggctggaggttacccgaatactcaagttattaactcctcgaacattccatatttagcaaacgaacatgtgcaatgtcaatttgtagttaagttatatattctcgtatatcccaaacttcaggaccaatttctgccttgagtttgaacttcgaagaggtgttatcctgttgctgatcaccttactacacatgaagcgagaatattagctacatcgttcgacgctgtccttaccaaatatagggatcaacggagttgatgcaagaggagagtgtaccgtagcacaaagggcagacttgacgtgatgatgtgaaggcgtgtttcacgtaatttacaaactcgagacacgcataatacgtgctttcaatacaaaacggcatttgaaacgaggctaagcatgattccgattagcgtgttgagaaggagggttcgagaaagaatctgtgcgcgagcggtgaaactgatttcgatccgccctgtatcccgggggtaacggctaggaatgcgtaaaggataaggcatggcatcatattccctagtacaaactacattcaattaatagcaaaaagcttggtaataacgagagtcctgcaattttctgccttggctgcaagtgataaattagaaagagaaccagagtctcgcttaggtctccgtttcttgtgtcaaaaatccccagtgtatgattgtatccagataataaggtataagatactaagtccgactgtctgattccacttgctgaaagaatgtatgctatgtgttgttagcgtgagactaaatgatattgaatagtagcctaacctcaaatatatatgaatataatgatgagccaatatgctctataaagtgggttgtatacttcgacagcctacaggcagcttttctggggatgttttcgggattttttatatatccatgtgaatcacccagttgaagcaatagtgagctaacattttcacgattaagatctatagatgtggtactattattaattatgctgtccccaatatttgctagtgggcttagtgttctatctatataggataatgttgtgtaccacttacctatcttaatagctctattggagtatagaatgatattattgcacttgacgcccctgtgggctatgtagagctgcttgtggatgtatttaaggcccctaagaacacttctgtagatgcttgccagatctttctcacttaattctaaggtgggagttaagccgacttgtgtaagattgatagcgaaaccatggtaattgtaaataaagtgagtagatatgctattatagaaagcctctaccaggcccactacattttcatataacgcaacttgcagtttggagaagctagcgccctatctgccggcgtctcttcttttaattaagacggttgagtacctaaagtagttgctaaggcttagctatctgtaactagcctgattgatcttctaattcaaagaatacttttgggaaggatgcctaaggtggggtaaaccatacctagatagggttttaatatcaagatcttagtagaaagtgtgatggaaaaacttatatcttaggaatatgcctattgtagctgagactttccaatttgtagctaggatcattcttagcggtagctgttaggaaggaactatttaacccgttaggttgagatatctttaccatagtaagattggctaaggcttttttttctcccaccgatggcaaagagggcatgctggcctgctttatctttattataatagctctccagcagatataggccatttgcctagggtgtaagcgaattatattttgtccggggttatcgatgatttccgaagccatagtggggatgagctagtgagtactgtggtaaggttaatttcacgtttatccttaagaactaggctaaagctctaggcgctcgaaaacagcagaattgcacagacgcaagtagggtcgcggaaacaaaagtacagctgcagatataaaagtagagccgcagatataagagtagagttgcagacacgaaagtagagtcgcgggcacgaaagtagagccgcagatataagagtggagtcgcagacacgaaagtagaatcgcggacacgaaagtagaatcgcggacacgaaagtagcgtcgcggactttctccacttttcgccccacaaaaagctgacaggcactagcccaagctagcaccattacaacttagggttatagggatttgattatgtacttgattttctaccaatcctaactggctaaggcccgctgtattatggttcttatataccgctaggaaagaagcaaataggaagataaagacctataaatccgaccctagtatatgctaaaagtagatgaataagtttctgggcttttcactgaaatgacttattttgctatcacttgttttctaacgataccggaggtaatctacggtgtagtcctcggtcttatggctctcttatttgcattgtactgtcttacattatatatattctcattcttattaacctctcctttcttgtcttcttgtgttcgaccgtttctattgtgctatgtgatttatgcccgatcctactggcatttcgccggtcttggaagtacattaagaacctattcattgttgatagttctttattttgccggcactggtgtctgcaatattgtgcgggtctattccgtttaagatgctagtaagagggtagcgaagctctcactcattaacttatttctaatgtttttgggcggtggttacgagtttagcgcttgtcttcttggagtttccctccattcctatggattcctttatcgattatttgcgcttgtagctctatttgaagctctagcttatattataatcgttgctcgatcaagggcgatatcttaggcgaacgagatgcaattctatggtctcctagtacgttttcttagtgctcctaaaatgtagatggatactgaaattagcaaggccgctagtatgtttttggctttggtaatattgctattagtgaagaaaagggtttatgaagtattccttgtcacctacattggatgtgcggtgacgatgatctacggagtgtggcagtatatccggttggctgaagggaatttttgggtattcctactagtgttcgcatgcaccctggttattataggggttttgcagctaattcgtattatctattgtaatgtggtgataggaagaagctatatatgaatgaatctgcaaccctatatgggtgatattgctcgaatgatactattattgcctagaccgtaggtcgtgcgcgccggttaacgtattaacctaggagttccttctgtgggtatcttttatattttttaatcatacccttttgctattagctggtgggagaatgatgttaatggctgggcggttttaatcttaatcttgcttcgtcctcgttccggtttcatgaagagactcttcgatcgcattgagctaaatagagaatgtagggcctggattgatggcccttttggtctgtcatctgttagttagagattaaactgtaatgtcggcgactatagatatgttttcatgattgctaccggtatcggcattgcggctcagttgctatatattaaggagcttctcgatggccatgaaaaggctcaagtatgtatataggtaatctcgcttgtctggtagttagatagggttggtgattatgagagcgtatgagacctactctagaccctcgttaggtaagataatggatacgttcgtgtctatttctatattggcgataccatctacttacgctgagtagatgctttatgtctcaatttacgatctactacgtgcttacttagagaataaaatttagtatattagtaagaataggctgatagatatatatagcggatatattagctaggaaaagtagcttaatatagagataggaaattaaatagggaaaatgattgtcctaggtaagccctgttctctccctttattatgaaacgagttcttatcttaaatcagtatgtgtataagtacaaactcggtataatatcaggaacttggtcaggtcacgtgtagataagaatgtcgagctattcgaacctgagttccagccttggggttaaactggaagcttacgcgccttccttaggctgtgagaaaacgaaacgaatataaagacgctagagaatagggtaatgtataatattaggtattgcgaaagtgtagagaaggaattcccatgaatatatagttactttgttggccaaaatctaagtacttaaatacggtggaatagaaaagagtgttctttaatttagtctcttagctaaaatactggatttgtataaaatcacttatattgagaaaatttaccgaccggctaccttcaaccatatttagctgtacgtccggtgcctaacacgtcaataaatgctggagatatgtgggtaatttagccgatcgtaactttaaagtatttactaaatctccaccctgtgatactaaaaatatatccgcgaatgcagggtgcctaaggcgagtattagtcatcgaaatataatccttaaatatataaataaggacagcacttcggatataaagtgttaatattatatttctacttttacaactagtttagaatggcatccaatttgaatcgggagaagcgcgaaacttaatttcctaagaaactgtggcccgataatggaagtatcgttaaggaaagtaccgaaatcgagaaacctaatgagaaattggtctaaaataattatgcgtatcgacttggggtccctattattctaactgaaaatattaacagcttatcaactgtcaaagtagaatcaccggtacagtaccatctatcttataacattgatcaggtaggcctaggcgtgatagggcttaaagatactgagaacctacctacctactttcttaagtagtgtagcatttaaaatacccacgcttttagacgactttaatctgttatacaccaaaacttggtgtgtttgatagaaggcttttaatctggagggaagttctatatcgtatacgaatattatcatttggctattagccttggttgtgtagtaacgaatgttcgcttcagtgaagtagatatagtaactatctgtaaggagatccttagaggggttatttttatctactacgagttgaagacctcttgtcccttgttagattgtagtaatatacttctcacattgaaaggcgaagtcaagataggtataggacttgatgaatatgatgaccaactctgaccattagatagtaaatataggggagtgtttaatgaagaggagatcgggcgacggcattaaagaagacattgaggctattgggtctatcgtgactttattaagtgaccgaccaacttatataggcgaccctaagtaaggcctgggtattctgtctctttctaagttggcgcagtcgtttgttgagaaggcgaatacttctagttctgtagaggatctactaaaggtcagtattatttaaactgaagatgtgaatatataataatagatcgaaaggaagagtttctttatctggtaaacctagggggatgttggagtttaaagcgttattactactaggcatttcctttaggaatctgcattggcaaacgtgttaatgacgtttaccttgacgggatgtgttggatataatataccctaataaattagctattaggaatatgaggagctaagaagaatattaattactacgttcgcaaatctctatctgtcggggctactaaatgtgcaaacgaaatagaacttcgtctgtcgggactataattaaagggatagaaagctaaaaaaatatttgtggtgctatttttgtgtcctacattgttcaccaggaggattatccacggcatgaaggggtctatattctgtacttcgtattctgacatggacatacaactatagtggtgagccgccgtacttgcaatctagactcctgtgctccgattagttcacctgactatacggcttataagcatctatccggtatgttccaagcatggaaggcgatgttgagcgctatactaagataaaagatagtggggcgatacgaggcctgtcggaatttattataggcaaatctgggggtaaagcatctgtcgcagtacctactaggtgtgctatgtagtacgccactatggtgtcgtcaactactgccgctgtctgcttagaggcgtaatcctttagataagagtgaggctcattattagactgaaagggggtgtaacagtgcagataagtggcggatggagtaatatcctctatgagatgaaaaattgattgaagaataagaaaatagttttattccttataactccttatcaggtgccgtgtcctgatgacgctttcccgatcgaatgtctgtaaaatctgcctttctctttcctgtatgaatatcatagtctagaacgtaatcacggagtttatctaatgaaatcgtcccttccatgtcatttccatgacttggattgtctattttcctaataagtattaaccattcttttaaagctactttatataccttatttatatccagagtacctattctatacttattaattactataaagagatgattacttgctagatcttgtaagactgctcgtaggttgaatccatcccctaagaagaatttgtaatagacttgtgattcgaataggtataaaacgatcacttcttgatgtgattgataccacgttgaaaggatcttaggtaccttatttcgaacggataggtagtttttcgtttctattggttgagacgtttcctcgaaactagctgccaacggtggagcatcatgatcgggagttccacttgggtgattagctaactctattggcttactggtatcttcctctactaactctggtccggagtttattgagggctggggtgcttccgaaggcgatggattcacgggttgaacttgtagatgccactcttcaaaatctatattagtattgatagatcctagcgcggtcttagtaagccttatgagactttggatagggctagcttgtcgtttatctaagattggctgaaaaaatgaacttttgccgaagaacgacctgataatgtcttttaccacgccgagtgacgttatatattctgacggtggctggttgggaccaaagatttgattgtaaaaaatgtttctgcgctgctacagatactcgtctcgtgttgggctgttaaattggtggcttgcttcgagttctgggttatttgttgtgaattgggctgtactattgtcctccgctagatacctaggaaggttctgtaatatgctctgaagtctatttgatatcgattgtacctttcgctctttgtatttgtagaactcctccctactaagagattcgaaaaagccttgtgctatatgttgccctagatttctgcttcgaagctgcctaatttggtccgactcaaagcctaatcgcgaagctaatatagtaagcttacttaggcttatatctatagtggaacattcaaattgttgacgaaaatttcttatgcggcctccttggtggacgaaatgcctgtaagcaaaaagctaaagctgtagtatagatacaacgaacgggtattcagtttgttgtattgttgtgaatttgtgttctgttgtctggactttaaggagacctccagttccgataagattccattgagtaagtataacttttcgaaggttttgtttgaattttagaggatagagacagtggagcgctcttgctggtctcttaataaacagtgtatcttggataagcgtagtaagggataatattctcctaggtgtttggagaaggcgactcttaaggacttccctgtattgagttgctctaagaagaggaaatatcttttttgaatccataagatcggtgatacgttttcggtctgccacagcgatgctaggtattaatcctttaatatgggatatggaatccgagtcgataagctatctgtcctaagatttaagaaattttgtctatatttctaggactatgtatagataatggtttagtatctaggaagttagctatgtgcgaggtatgcgattatcaaatatacctctgggcattttaggcctaacatcctggtgatttgtgaagattgtagtggcttctatagcctaacgtatggtaataactcgtctaaaatacgacgctgttgatcgtcatgttgtaagcgttgtatttgtttatgacagtcttcggaaccaagtctagtctaccatttctgctcctgagtagggttttgtgaaatttggtatgacctgagtgtacgatatatttcgctgacagtgaagcttatactttgtgtcgattcttcgtgtaattgggcgagtgtatcgattgagatatctataacgttcttagtctctattcgatatttttcaatgctgccctaccatttagataaagatcaaccagccatgtagtttctccaaatctctcgctagcttttagacgatgtttcctgtatacacaagtaatgatatcctctccttctaataggagatttggctgattttttggatcgataagtgcttctggggtgagatttgattttgcaagtgcttttcttaggacctcctagttaatagtcgcggcaactctgtgctcaggctctaggttaccatagccttcgatttcaaatatcctaaaaagtttctccacatttttctcggcgatctcttgggttcccgtgaggttatactctttatatctaagatgctgtaactttatgattgcgtatccctaataacattgtagccgttgaagggcgagggtgtttgttcggtgaccaagaaggttctcgcttgcttccattctcttcttattttgctttaaatgaaagaggagaaaaatcttgacgaagatggaaaggagcgccataataattttaaatgtacctacaacactcaaacccgtgtcgcgctttgccgactccagcgggcnnnnnnnnnnnnnnnnnnnnnnnnnnnnnnnnnnnnnnnnnnnnnnnnnnnnnnnnnnnnnnnnnnnnnnnnnnnnnnnnnnnnnnnnnnnnnnnnnnnnnnnnnnnnnnnnnnnnnnnnnnnnnnnnnnnnnnnnnnnnnnnnnnnnnnnnnnnnnnnnnnnnnnnnnnnnnnnnnnnnnnnnnnnnnnnnnnnnnnnnnnnnnnnnnnnnnnnnnnnnnnnnnnnnnnnnnnnnnnnnnnnnnnnnnnnnnnnnnnnnnnnnnnnnnnnnnnnnnnnnnnnnnnnnnnnnnnnnnnnnnnnnnnnnnnnnnnnnnnnnnnnnnnnnnnnnnnnnnnnnnnnnnnnnnnnnnnnnnnnnnnnnnnnnnnnnnnnnnnnnnnnnnnnnnnnnnnnnnnnnnnnnnnnnnnnnnnnnnnnnnnnnnnnnnnnnnnnnnnnnnnnnnnnnnnnnnnnnnnnnnnnnnnnnnnnnnnnnnnnnnnnnnnnnnnnnnnnnnnnnnnnnnnnnnnnnnnnnnnnnnnnnnnnnnnnnnnnnnnnnnnnnnnnnnnnnnnnnnnnnnnnnnnnnnnnnnnnnnnnnnnnnnnnnnnnnnnnnnnnnnnnnnnnnnnnnnnnnnnnnnnnnnnnnnnnnnnnnnnnnnnnnnnnnnnnnnnnnnnnnnnnnnnnnnnnnnnnnnnnnnnnnnnnnnnnnnnnnnnnnnnnnnnnnnnnnnnnnnnnnnnnnnnnnnnnnnnnnnnnnnnnnnnnnnnnnnnnnnnnnnnnnnnnnnnnntctagtgcgtccctactctccagtgtgtccctactctccagtgtgtccctactctctagctcctgactaccgcgtctactcgccgatagacttggaaaaatgcgacaaataaccagagtgctgaaaataccctatcatggttagtctgcccccgaacccccattcttagcagtgttccagtacagtggtaaataacttagagtagcgtctgtattagactactgtactgtagtaaggtctacaaggattcaagttgcttagtggtactccagtcagagatatggaattcacatgtataaaagtgcagaacagatacgtactacagtacgttgcgaaaccggtgcaaccgccttcactcttcgagtgtttctctaggcgcaccgccaagataccctagaacatatgaggaatggtcccggaatatcaatattccgctagcagtctcgttactatcatttcctttcattaaatacgatgccttgtctcacaactgtattggtaattcttgagcagattcaaataggccaaacaccagagcaggggtttgtctcgtgaatctggtgaatctcccacatcctttgtcgacttgcgaatgtccctcgttgaacagaagatcacccacgggcagtagttcattattggatagaaatgtaacgttgcactatatctgtctataaaactttcgaatctttgaaagcctggagtttttggtgaacacgcacgcttgtttcttataaattctggactttcaatcattggacctcaagaaccgggaggagatgtatatacatatattgcacattgggtccgacactaatccctgcagtttataacacaggacctaattattagtctacgaatttctttcgttattcgtagagatatttgcattagaaggcagcccctgcctaaggcccgggccgaaaaaataggaaagcggagagcgagcaaactatttgcctgatggctagattaagatttatcaagcgaatcagacggggtattcaatatttcatgaagtcaccctactcccgcttgctccactggaatgtaggacatgatcgagatgacgtcacaacagtacgtacagccttagaaaggcaggaaagaatttaacagtcaattggctagcaatgtaaacttctgtaacaaaacgtgcgaacgatcagttttttcggtatacaatttcgaggtctgcgcgcagagcatgctcgtgctagagctcatgagggcccgtcacagtgctatttccttccctcaatagattgacatgatggagagcgaacttcgtgacaatatttgcgcacagcagttagcagatgtgctcccggtcggcgtggcgatcgtcaacgcgcacgacgagattgtcttcgccaaccgacgctttcatgagcttacgaggagccaccaaccaataggactggactgcctctcgcagtcggtccacgcagacgattatgagcatatagcccaggcatataatgctgcggtatatacgaagatggcgacccggagagaataccgggcttttgggggagcggaggaatggcgagggctgtcgctgacaccactaaacgacgacgatttgaagcagttcgagctaaacggtgacggcggtctgatttgtgtcattagtgatatcacaccggagaagacagcagagatattgcagaggaagattgcgaatgatgccaaagagcggaagcagcaacaggaacgctttatagatatgataagccatgaagtgcgcaatccgctctctgcgatcctgcattgtgcggaggatattatggatattttgcaggatggagcgcaggacgatgggaaagagaagatggccaagattgccgaagccacagagacgataaatctctgcgttgcacaccagaaaaaaatcattgacgatgtgttggtttactccaagctagatgcgtcgatgctgaagctagccccacaagaagtccagccaaagtcgcatgttgcaacgctgctgagcatatttcgccctgagctgcgcaagcagcagatcgaattcgagtaccttcttgacacgtcttacgcagattgcgacctcgactgggtcgtcgccgatctcgacaagattggccaggtattagtcaatcttgtctctaacgccataaaattcactgccgaatctcaaagtaagaggaatattcgggtctctatgggagctgcgaaagtccgaccgccatcatacccgccaaatatcgtctttttcgagccgaacgaagctgctttgaagcttgattgtaccggaggccctgaatggggccatggccagactgtgtatatcatggtcgctgtgaaggacaatgggatcggaataagtgatcagcatcagaagctgctattcgagcgcttcaagcaagctaccccgcgcacggacagggtgtatgggggctatggcctgggccttaacatcagccgcagactgtgccacatgcatggaggtgagattggtgttagctccaaggaaggcgagggtagcacctttggattttatttcactgtccgacggtgtcccgatacagacaacgccaaggtggacagagagtctcctgttgacaaactgtgccatcaggttcgggagctcgacagtaaaatcccggacatcagaagagacacgtccatggcaaatttttctgaagaaccgccaataaagcacgtcgatgaggtcgcgatcggcactgagagtgacgaccgaagagagcactcagcgaagctgtcagaagccgctatacgagataacagccctgcaatagatcggcgcatgtcgaacatcgacaaattttcacccaaacaagagcccaaggctataacagaaatgtctaaactggaggaaccacaacgcattctatttgtcgaagataacgtcatcaaccagcgggttcttgcgcgcaagcttaagacagcgggatttgaggtcaccacggccaacaatgggcaggaagcccttgacgcgtggaagcacgattcatttgactgcattctcatggaccaggaaatgcctgttatggacggaagttcggcggcgcgagagattcgggcgctggagaaggacaatggaacgcatacccccatattaggggtcaccgccaacgtgcggcagaaccagcaggcagatatgctggatgcgggcatggatggagttgtacagaagccgtacaagatgcaggatttatgtgacaggatccgtcacttggttgccgcaagagtcggtggaggacactcgcagagtcatcgcacatcatagtcgaggccatctagtttcgggggaaatgcaaagcacaagtaaaggaataacatcggatgtccctttatgtgccaatatccacatttaggactacgaataaaattccgccgagaaaccacaaccaatcataatatacaatcgcttacggatgtgccttgtcaaacatttcgagttgcaggtactactgtaattacctagattcgtaatgtcggactttcggcaccgttgacacgaaggatgttggccagtatattttgtcttctgttcactttataattattgttgttgttctattttatgttttattttgctatatttaagtgtcacatgcccggctgacttttcttctagaaatgaaacagtcgaaattcggtccccgttgaatatcaattttatccaagttcaaagggtgtgtagcatagatatccatgactgggagggtcgggcctctgaacagcaatcggtcctcatttgacccaaaggtttacggatcactgttaagctctaggtatgttatagcaacgagtgacttgcctagtagtctaagatccctacttcaggagttggaagcggacctctcatcatagtctattagctatcactcgaggtttccgagcttctttatcaggtggtttctctaggacgctgtccagatatgagtcgagctaactaattattatgccggtaaaagacgggaagctgttagggaggggtaagcgaggtgtcaggtgtatgtattaaatttacaaatgaatacatttcgaaaatcatttatgtacagaacgtgcgtatgattacatacgcagctcccggtataactccaaatatggactagcgtttcctggcgtaaggagcaggaaagtcaatcgaagagtgaggtggttgcaccggtttcgggacgtactgtacagaacttagactcatgacagtgttcttatgccaattcctcctataacctaatatctgacaatcttgcccttagtcggattttctgatccgccccgccttgagaactcgaaatgagactaatatataccaacaccaccaaatagatgaacacacaagcccctattatgttgcatagattcgttgatgcgttggcattcgcgagaagtaacctaaaggtcccactcctgctttgcctaaataacacgtcttttaaatatgaaatgatccttcttcttgtagatgaactctcgctgatccttcgatgacagaaggttggtttcctctaagcaatttgtgcatagtgtattgatgttgatgcgccgcttagcagggagtaaatacgaccaaacgcaaacaaaataggatccaggctcgtttcctgtgaatttgatcttcatgcgatgggaatcaatatcatgacaagacacgcaaaaccaggtgacagttcccttcattctaggcgatgttagcatgtatagtatttgctagatattatcaaaacttacgttcaagcctaacggactttgggatacgtgatctaagattaatgcagaagaatacctgccttcatatgtctaaatcaggctgtagactaaaaaatcatcaaactgtacgagcaatttataggatagcgctaatacttgagtttatagtgcgattcctagagcagtaatcctaatctacctgagtaccatgccgctacagataggtatatgatggtccgtgtcacgatcccacatatctgtctagacaaagctacatatcagggggtagggatgcaagctggcttaggagctaaaattaagtcaggaattagtgggacctcgatttaaaaagtgtgttgtaaagcatgtcgcaaagcgtgtcgtaaagtgtgtcgcaaagcgtgtcgcaaagcgtgtcgcaaagcgtgcnnnnnnnnnnnnnnnnnnnnnnnnnnnnnnnnnnnnnnnnnnnnnnnnnnnnnnnnnnnnnnnnnnnnnnnnnnnnnnnnnnnnnnnnnnnnnnnnnnnnnnnnnnnnnnnnnnnnnnnnnnnnnnnnnnnnnnnnnnnnnnnnnnnnnnnnnnnnnnnnnnnnnnnnnnnnnnnnnnnnnnnnnnnnnnnnnnnnnnnnnnnnnnnnnnnnnnnnnnnnnnnnnnnnnnnnnnnnnnnnnnnnnnnnnnnnnnnnnnnnnnnnnnnnnnnnnnnnnnnnnnnnnnnnnnnnnnnnnnnnnnnnnnnnnnnnnnnnnnnnnnnnnnnnnnnnnnnnnnnnnnnnnnnnnnnnnnnnnnnnnnnnnnnnnnnnnnnnnnnnnnnnnnnnnnnnnnnnnnnnnnnnnnnnnnnnnnnnnnnnnnnnnnnnnnnnnnnnnnnnnnnnnnnnnnnnnnnnnnnnnnnnnnnnnnnnnnnnnnnnnnnnnnnnnnnnnnnnnnnnnnnnnnnnnnnnnnnnnnnnnnnnnnnnnnnnnnnnnnnnnnnnnnnnnnnnnnnnnnnnnnnnnnnnnnnnnnnnnnnnnnnnnnnnnnnnnnnnnnnnnnnnnnnnnnnnnnnnnnnnnnnnnnnnnnnnnnnnnnnnnnnnnnnnnnnnnnnnnnnnnnnnnnnnnnnnnnnnnnnnnnnnnnnnngagctgggaaagtccgcccgccatcatccccgccaaatatcgtctttttcgagccgaacgaagctgctttgaagcttgattgtaccggaggccctgaatggggccatggccagactgtgtatatcatggtcgctgtgaaggacaatgggatcggaataagtgatcagcatcagaagctgctattcgagcgcttcaagcaagctaccccgcgcacggacagggtgtatgggggctatggcctgggccttaacatcagccgcagactgtgccacatgcatggaggtgagattggtgttagctccaaggaaggcgagggtagcacctttggattttatttcactgtccgacggtgtcccgatacagacaacgccaaggtggacagagagtctcctgttgacaaactgtgccatcaggttcgggagctcgacagtaaaatcccggacatcagaagagacacgtccatggcaaatttttctgaagaaccgccaataaagcacgtcgatgaggtcgcgatcggcactgagagtgacgaccgaagagagcactcagcgaagctgtcagaagccgctatacgagataacagccctgcaatagatcggcgcatgtcgaacatcgacaaattttcacccaaacaagagcccaaggctataacagaaatgtctaaactggaggaaccacaacgcattctatttgtcgaagataacgtcatcaaccagcgggttcttgcgcgcaagcttaagacagcgggatttgaggtcaccacggccaacaatgggcaggaagcccttgacgcgtggaagcacgattcatttgactgcattctcatggaccaggaaatgcctgttatggacggaagttcggcggcgcgagagattcgggcgctggagaaggacaatggaacgcatacccccatattaggggtcaccgccaacgtgcggcagaaccagcaggcagatatgctggatgcgggcatggatggagttgtacagaagccgtacaagatgcaggatttatgtgacaggatccgtcacttggttgccgcaagagtcggtggaggacactcgcagagtcatcgcacatcatagtcgaggccatctagtttcgggggaaatgcaaagcacaagtaaaggaataacatcggatgtccctttatgtgccaatatccacatttaggactacgaataaaattccgccgagaaaccacaaccaatcataatatacaatcgcttacggatgtgccttgtcaaacatttcgagttgcaggtactactgtaattacctagattcgtaatgtcggactttcggcaccgttgacacgaaggatgttggccagtatattttgtcttctgttcactttataattattgttgttgttctattttatgttttattttgctatatttaagtgtcacatgcccggctgacttttcttctagaaatgaaacagtcgaaattcggtccccgttgaatatcaattttatccaagttcaaagggtgtgtagcatagatatccatgactgggagggtcgggcctctgaacagcaatcggtcctcatttgacccaaaggtttacggatcactgttaagctctaggtatgttatagcaacgagtgacttgcctagtagtctaagatccctacttcaggagttggaagcggacctctcatcatagtctattagctatcactcgaggtttccgagcttctttatcaggtggtttctctaggacgctgtccagatatgagtcgagctaactaattattatgccggtaaaagacgggaagctgttagggaggggtaagcgaggtgtcaggtgtatgtattaaatttacaaatgaatacatttcgaaaatcatttatgtacagaacgtgcgtatgattacatacgcagctcccggtataactccaaatatggactagcgtttcctggcgtaaggagcaggaaagtcaatcgaagagtgaggtggttgcaccggtttcgggacgtactgtacagaacttagactcatgacagtgttcttatgccaattcctcctataacctaatatctgacaatcttgcccttagtcggattttctgatccgccccgccttgagaactcgaaatgagactaatatataccaacaccaccaaatagatgaacacacaagcccccattatgttgcacagattcgttgatgcgttggcattcgcgagaagtaacccaaaggtcccactcctgctttgcccaaacaacacgtctttcaaatatgatttgatccttcttcttgtagatgaactctcgctgatccttcgatgacagaaggttggtttcctctaagcaatttgtgtatagtgtattgatgttgatgcgccgcttagtagggagtaaatacgaccaaatgtaaataaaataggatctaggctcgtttcctgtgaatttgatcttcatgcgatgggaattaatatcatgataagacacgtaaaaccaggtgacagttccctttattctaggcgatgttagtatgtatagtatttgctagatattattaaaacttacgtttaagcctaacggactttggaatatgtgatctaagattaatgcagaagaatacctgcctttatatgtctaaatcaggctgtagactaaaaaatcatcaaactatacaagcaatttataggatagcgctaatacttgagtttatagtgcgattcctagagcagtaatcctaatctacctgagtaccatgccgctacagataggtatatgatggtccgtgtcacgatcccacatatctgtctagacaaagctacatatcagggggtagggatgcaagctggcttaggagctaaaattaagtcaggaattagtgggacctcgatttaaaaagtgtgttgtaaagcatgtcgcaaagcgtgtcgtaaagtgtgtcgcaaagcgtgtcgcaaagcgtgtcgcaaagcgtgtcgcaaagcgtgtcgcaaagtgtgttgcaaagcgtgtcgcaaagtgtgtcgcaagtgttgcgtgtgtattgccacggtttttatcacagtgtatcaggagatgtgtggacatttaaattcgcagatatgccgcacaaaatcgtcgcttttcacaatagcttaaggctggagataccaatccgtctatcatccttcaatccttataaatattggaaatatgaccttctctatattcctacttcttactagcgtctatatacgcgctgccttaggtggtagtctcacggttatcgattatgatcgcgaatgcgtggtatggtctgatgataactatggctgcacgggatatttatcatcttttggcctccttgatggagacgattgttctggtgtgtaatggttctaccgatatactattagtactgatgaaaccctagatctaagcatggttatatatggtatccgtaaggactactctaagctcgatataggcgtatacagcagcacgaaagacaacatcatacctattgcatagatagatataaacgaaaatgggatggttaaattctataaccaaaatgaagacgagatagggtgtacattggataacggatttaaggttggcagcttgtgtattgcttccgacctgtctttaccgtctttatcggcggctttatcggaatctgcaccttctacatcggcatcgtccttatcggtatctttatcagaatcgtctttatcggtatcgtctctattatccacttcagtatcatcaagtgaaatatctagctgtactaactctggataagatgattatcgggtgactatgcaaatggccttgtcccttagaatatcatttatgatatagctcatcctcccgctcttggattgaacgattactcttactttcttttcctacttagatagaaccgcgttacctgaccctatagtgtacagagaaaagatcgatagtatatagatctctttggatatggttttgcctaccgggttttctatatcactagcgtgaatacgaaagagacttcccttactttttgcttctctataaatgttatagcagttgagcctagtgacctcgttttataaaaccgggttttgcaagtggatgcgcttgattggtgtagactgtcgatctggtaattaggaaatgagactaatatataccaacaccaccaaatagatgaatacataagcccctattatgttgcatagattcgttgatgcgttggcattcgcgagaagtaacctaaaggtcccactcctgctttgcctaaataacacgtcttttaaatatgaaatgatccttcttcttgtagatgaactctcgctgatccttcgatgacagaaggttggtttcctctaagcaatttgtgcatagtgtattgatgttgatgcgccgcttagcagggagtaaatacgaccaaacgcaaacaaaataggatccaggctcgtttcctgtgaatttgatcttcatgcgatgggaatcaatatcatgacaagacacgcaaaaccaggtgacagttcccttcattctaggcgatgttagcatgtatagtatttgctagatattatcaaaacttacgttcaagcctaacggactttgggatacgtgatctaagattaatgcagaagaatacctgccttcatatgtctaaatcaggctgtagactaaaaaatcatcaaactgtacgagcaatttataggacagcgccaatacttgagtttatagtgcgactcctagagcagtaaccccaatccacctgagcaccatgccgccacagacaggtagatgatggtccgtgtcaagaccccacatatctgtctagacaaagctacgtatcaggggtagggacgcaagctggcttaggagctaagattaagtcaggaattagtgggacctcgattcaaaaagtgtgtcgcaaagcatgtcgcaaagcgtgtcgtaaagcgtgtcgtaaagcgtgtcgcaaagcgtgtcgcaaagcgtgtcgcaaagcgtgtcgcaaagcgtgtcgcaaagtgtgttgcaaagcgtgtcgcaaagtgtgtcgcaagtgttgcgtgtgtattgccacggtttttatcacagtgtatcaggagatgtgtggacatttaaattcgcagatatgccgcacaaattcgtcgcttttcacaatagcttaaggctggagataccaatccgtctatcatccttcaatccttataaatattggaaatatgaccttctctatattcctacttcttactagcgtctatatacgcgctgccttaggtggtagtctcacggttatcgattatgatcgcgaatgcgtggtatggtctgatgataactatggctgcacgggatatttatcatcttttggcctccttgatggagacgattgttctggtgtgtaatggttctaccgatatactattagtactgatgaaaccctagatctaagcatggttatatatggtatccgtaaggactactctaagctcgatataggcgtatacagcagcacgaaagacaacatcatacctattgcatagatagatataaacgaaaatgggatggttaaattctataaccaaaatgaagacgagatagggtgtacattggataacggatttaaggttggcagcttgtgtattgcttccgacctgtctttaccgtctttatcggcggctttatcggaatctgcaccttctacatcggcatcgtccttatcggtatctttatcagaatcgtctttatcggtatcgtctctattatccacttcagtatcatcaagtgaaatatctagctgtactaactctggataagatgattatcgggtgactatgcaaatggccttgtcccttagaatatcatttatgatatagctcatcctcccgctcttggattgaacgattactcttactttcttttcctacttagatagaaccgcgttacctgaccctatagtgtacagagaaaagatcgatagtatatagatctctttggatatggttttgcctaccgggttttctatatcactagcgtgaatacgaaagagacttcccttactttttgcttctctataaatgttatagcagttgagcctagtgacctcgttttataaaaccgggttttgcaagtggatgcgcttgattggtgtagactgtcgatctggtaattaggtgatgcccgggcaattactttactcgcaaaatgctagataggattagagcgagatttagcacttaggcctgtacttcacatatcactaagggcctgcctagaaacggtgaatgagcctgtgaaatgcatacttatagagccatgccgaggggatgtacatctaagggtgtcaggtgctactggtctatacgctgtgatttttatacggacatccccctagatgcccatccagatcgcatgatgatcgcacagttacacggaagaataccccagttgagatcctcgggctagctagaacgtgttgttgccctctccttgtgcgattgtcaaacacaatagaacagactagcgtatcttggcactagggttcgagaatccgtcgtggttgtatgagcctcgctctgtgctctaaaacttgtcacctgtaaatgaagcaaagcgcgcatcagaaggctgcaagatttgagagcttgttcactaaaggcttctttctgtacggtgaaagactaccaatctttgaacccccgacggctgtgagacatatcttttcctcgaccacacttccggcaccttacttgtaaaaccgacattggtcttctaaggccacaattctcacagtctcctaatagcggagcatcgaaaaatgtgtcgagcatttctttcacaaattctggcacttgggcggcgattgaatcgtacttcgcgcggacggatgtgtctcgtaaatggaaccccagtttgtctctcgacaagcaaacggcgaactctttgagccccttggagttgctgaatggcgagaaaaagacatcgggtattgaatcaagatactcaaaggggtcaaagtgacctacagttctgttcaaatatttccccatggccgcgtcgcaaagctcggggatgcagtatttatcgcccaaagcaaacaattgtgcatgtaatcgaagagcagatattgacaacagcggcacattaggtgagacatctgtcggactatcatcaatgagctctgaataatcacctgtgtataagtagtccagcatctttttaacgacgggaatcgattcatccgtcatctggtacgtagaatctgctgcttcctatatttaaactatgtgagatacgaagagagaaagactggcttaagagataacttgccctaaaattcccggtgcaagcggcccgaaagataggagattgcgaacatagtatgactttatgcacgccgaaatcgactccatcacacataattttgaaatcggtgtaatcgcctctttcgcgacatcttctgttatttagtaaagttttgcaatgtcgcggagaacgtactctgaaaccctattaatgatgcgctgaggttgtgatgacgaagtgttggacatggctgcgttaacagtatttggaagtaaaataggcaagattgtcagaaagagctagttgggatttgaatacttttgaaatgttttgaacgtcagactgtagcaaaccagagtccgagtatccagtaaatgtcttgacgtagtaccttctgttatgacgtcaaataacgcaacacaaatctgtgttgtctttcactgagccaaacgtgtttgatgaatcttacaaagcttttttatcatgtgactcaatattacaatacatttcgatatcttgaaattgtctaaatcaagaatagactagcgagtgtcagaattgagtttgggaaagaatttaaagagagtaacgtagtgaaactgatttcgagcgcgtctgtacctgcagactactcataaacctgctttttatatatttcgaaaatttttcaaaaaggcccttccaaacagagaggttgggaaaatcgtacactttgtagtgtcttgtcatgccagtacgtggtgtcaacaataaaggtatagagaagtcgagaaccccctctagagaagacggatgacggtgggttgctatcgtcattatctggagtgaggatagtacactactgacgtccactatcacaaaatcctatgaatgaaactctcccagattcgtgtcccaaggcaagtgtagtcccgttaatcgctgaacaccaaggccgatattcaggaggaagccacagtacctttctacggtgaagggttatctactaacgattcagaataaatatcccggcttccccttaagataaattggaggtatgattatcacatccggactgtgttttaaggtatcccagattggtgctcagatgtgaatcatctcggacaaattccaggttggtgaccagcccgtgagcacccaaactctgtcgcagcgcgcctgtggcagtgtcccagagcctgactgtcttatcatctgagctagacgccaggagtcggccgttagaggagaatgcaacagatcggacattgtctgaatggccggagaggacctgttgcagcgcgcctgtggcggtatcccagagcctgaccgtcctatcctttgatccagacgccagatatcggccgtctagggagaatgtcacacaacggacttcatctgaatggccatcgagaatctgctgccacgcacctatagcgacattccacagcctgactgttttatcacttgagctggacgctaggagtcggccgtcaggggagaataccacagaccagactatacctaaatgacccttaagaatctgctgccgtgcacctgtggcggtatcccagagcctgactgtctcatcatttgagctggatgctagaattcggccatctggggagaacgccacagactggacataatgtgaatgacccttaagggtctgaagtagggcgcccgtagcggtatcctatagcctaactgttttatcgcttaagctggacgcgaggagctggccgtctggggagaatactattaaccagacccaatctaagtaaccatcgtgggtttgctgccccgtatccgtagtggtatcccatagcctgactgtcttatcttttgacccggacaccaggattctaccgtcgggagagaatgctacagactggacacaatataaatgacccttaagagcctgctgcagcacacccgtggcggtatcccacagccggaccaacctatcgtttgagccggacgccaggagtcggccgtctggggagaatgtcacagatgcgacccaatctggataccatattgaatctaaatggctatcgagagattgtcggagcgcgcctgtgtctgtgtcctagagcttgagtgtctcgtctcttgagccagacgccaggagcagatagtctggggagaatgcaatagaatggacagagtctaaatggcccctaagagtctgctgcagcgcgcctgtagcagtatcccagagtttaatagtcctatcatttgatccagatgccagatattggctgtttaaggagaatgtaatagaccggatattgtctgtatggctgtaaagggtctgctgtagtgtgcctaaggtggtatcccagagcctgactgtcccatcatttgatccagacgctagatatcgcccatcaggggagaatgccacggactggacagactcagaatagagatcgaaagtctgctgtagctcacccgtagcgatattctatagtcgaaccgttttatcacttgagccggatactaggagtcggccgttaggggagaatgccacagactagatagacttagaatggccatccagggtctactccagaatacctgtggcagtatcccacagcctgaccgttttatcactggagccggatgcgaggattcggccgtctggggagaatgccacagattggacgcactcggaatggccctcgagagtctacatttctgagctccagatttccttaacctttggaaacctacatatccaactagggagctcttcttcaaattccctccgaactattgctaatctaggtacaaatagaagtcctgagtaataaagttagaggggcgccttattagcgatatatctatttttaaggataaaccgcctgccatcatatagaagattggttattttataatcctagtcaccctatattagtaacggcatgtaatcacataggttttcctatagaaactgacacttatcaccagctgtaattaatcgatgatctctagaacttctgatataacgcctagaatgctcattgcttctatctaatgtatgaaatgctcccagagaaacaagaagatctcctctattatagtagcaaaattcttactctatgccagatgatgtacctaatagcgacaggaatattgtagctctggtggtaaatgctaatggatagacatggcatcgatctcagttctttgtattctatagccctttaggttgcaaatattcttctttaagcgaccatgtatagtgataagacagcgcatggcgatatctatatgtttcttgggctcgtccacaaggaatctgctctaggatcggaccaagaaatttcggaaggataaatgtaaaatcctaataggcagatctcgtttctttagaacgcttagaacagattgaaataaatccaatcgattactgattaggtctagctcaagcctaagaaatagggagagcgcattgattgaaagtggaacagtaagaagaatgataacaccgactatttcctggaactcttataagagctactactgttctgactcattattgtcttagtcatctatcagttgtgttagaattggcaggtacgtcttgtctattttagcggtatatttaacttggtcctttaaaagctctgtaaggtgtgatacaggttcccattttagattctcgatgtatcggcacacggtggcagcacaaatgaacagtggaactgatatcttaactaattgttggatgatgtcatcgcccggccagtctcgatatatatttctatcgtgtctgatcttcgcaaatctgtccttcaggaatagatatatatcgtgttctgtcgcttttctggagatatcatgaagaaccaggtcctggtaatcatggttcgtgatctctaaaaagccgaggcgaatcgacagttcaggtcggcttgtcaagaatacacgaaggcgaatcgcgggtgccttttgtagaagaggcaataatctgattatggttcgtacatcttgatcatgttcacattcgtccaaggcatcgatcactatcacagcggtatgaggagattgctcatcgagttgcttaaggtcaagcaatggttgaaggagtattttatcaaactgctctcttagcgattttgaagcaatgtctgggtcgccatggagtgccttctgcagaccagcacttagcccagagaaatttagcactagttgccttgcgagtgttgggagaagttttgtggcatttcctcgatcaccttcaccccttttgaagaaaaagcttgctcctaggtgtttggtctccttgagcgattttgccacagttcgagatatcgtggatttcccagttccagccattccatttaaccaaaagaggcactttgtgttgggtgaaaaggcccattcttttatctgttgaagaagttcggtcctcgtgccttgcagacactcatcttcatgttgatctgggtatgagttgtattcggccccacgcgcaaagggtaacttgtcaagaaccatcttctgattggcatgctcaccatgctgaatcattcctgtgatgagcgttctagatatcgtttaatcaaatatcctcaagcaagagcatgttatctacaaaaacatacgtctaatcaagctgcaacgacaagttaaaggacgacttgtatctttcaagattctaaacaatagcctccatctctgtgtatttcaagggccacttcaaggctcgaagtcccatttttcttatcagcgtctttcccctccctggattaagtttcgcttctaaggctcggaggtcggagaggcaatcggtaatattactgactagacacaaagaagtaggtagggtgttactatggctttgaagtaatttatcgaggtcttgtagaattccttagacgcccgaaatcgccctttgtaatttattaatctcatctcgtgtattgtttacctcctggatgtagtccccgcaaatcttcaccaggcttcccgtcagttgaataaccgcgataacgctcgctaccgatgaaagtaaatccatatggaagaacgggcggcataaatgcttaatttcatgtaagtagggaaacagatcactatagcgtgggattgtgttcggtttggtagtttgggctttccggcgagaggtaaaagaggggtaggttaggcggcgggagcgaggctgtgatccagggtgcagtttcgagtgctaagttgaccgaccaatcacgaattcagccgttgacgcactccaaaaggccacattgggataacccgttcttatttctagtggatactggctggctgttggctcaaatgtcggcccgaaccgaaccgaaccaaacccgtctcgccagacccatctccgttgcgatgcgcctctggccacctcatcaacttttcggtcgaccgcgcgacatattatggcaccccaacttgcacccccgccatcccgtcgaggtacaaggtgggcttttcgagcaggtgatcgcacaacgcctcaagcatgactggagtgatgctacgttgtcgtccacctttattaagcggtgctttgacgctgccaaacatccgtatattggaagagattctcaggatggtactcttatttgcagccagcagcctgcgccatctgcggtatggacagctccccaccgtgtatcatgtcataaataagatcttgctttgagggagctaggtttggggtcatcttgattcaaccactggtgattgatcgttaagataccctccgtcgggtggttattttgaaggtgggtgagacgtattgattcacacgcaaatacatacttgaaagtagtaacctacgtaagaagcaatacacgcccaactgacaggggtactccggaaaaattcccaaacagagactagcgggtcttggcattgtgattcgagaaacaacgaaagagtgtagcggtggcaccagtttcgggacgcactgtatgccgtcaaaaattactaacggacatctgagatgacatatattgcaaggctttatgtatgggctctgaggagacacagtactatatatattatgacatgtatagtagatcagagatagttgccctttcggcttagccgccgggcgttaataaataaattgtgtgtgtgtatgccgtcaatctaacatcgtttaatcgtgtaataaatggccaggaatgacgatgagtgcaactccaagcaccatcgtttcttgtaatcgtcattatcaacgatataaccctgtcaatgctctgcgcctagtcgtcatccaagtgtataaattccataaataaattgtctgcggaggttatatccgaatctttaaaactggttggcagagtgttggtgagaaaataatcctctaaactcggcaatgtttcattacttaaattcctaaaagtagttcctgcaggctctgactgaagctgccactttctttttcgtttaatacaatttgactggggctcttctatggaatgtatatcaaagaagtgccactggagatataagttattaatatacttcctttcttcgcaatatagatgagggcagaagactgtggctaaagagaccgctgaccctaagtgtttatcaatgtgattcagaagagttgattttgcaacctattgttaaaatctcttgtctggtttcttacttttatcgcctaggtagaatggacagaatcctagcgtaataagtgtggagcggaaagtcaaaagaccacattgggggttgaggttgtcgagatagtatttgtaatgattctcctaggaatcttcgttaaggaagagtttagtgtaaagataacaaaattaaacaaagctgtgctgtacgtgtcgataggcgcgcttttcgttcttatagcgctgctagtattatataccatttaaggattttcttcgatactgtagtatatgcttggctctcccttgtagtggaatgctgtcttcttgttaactttttgatctataatactcttcgggtatacttactctagtatagacttattgtatattggataacggccttccttaggggctatgccggggtagtaaatggcacgttctgtcgatatacaaatagtaactatatcttctaggcactgtcgactaagtttactatctagagttgccttctttaataaattcttgctgagacgggagcgctctggtagatatttcttatagatattgaaaagaggcgttagattgcgttcggagaagttgttcccagacacgtactcagtgtatgaagtatcctaccagcttttgataaagtctttcttctaggtgagcaatctctttgctttcttattatagagacgatcctgtttaaatataaggtccctattctcttctagtcttctagcaatctcctgcgttaagtgggtaattctctggttaatcttaataatttcatcgttagattcgaattgtgcggtcgtagctgtattaagttttagcggcacattcgagtctcggtgataagacatgctttgttccatatcgcggcatttgtagttagggtctaaattatagaataaggcttgtatatctaatgccttaagagaagactgatattttagataggtgttatgattctaatgattaagagcctggctataagtagcctgagaagccttggctaaaattccttagtaaaattgaggtgtaacggcataaatatacttacagttgatcttatttgcaatacctcctcgaattccatgtatatataactggtctttaaacctatcccgctgggccaaggtagtgaagttgtgctgtaatgaggagaaggttaacgccttcgttaggtcgggtccttaagcagtgacccttctgaagaatggtaaatcctttgtggtttcattctattctaaggtctatgactctcttctgttaggtggctttgcagtaagaaccttggtcacagtggtaagtcctttaaaggtaccatccgctatcctatagacgattacctagaaaataaaactcatcctaagcaccggatgctccctgaaccaattttttggtctaattttattatattagctatttctggatagaatgattatagctcgtaaactcacaaggtagtatcgtcgcgataacgccagcctttcaagaatttgggatcaattattacctaacgtatcagagaccccctttccttactctatttgagatgaaatgaaaggtgctgataattatcagttagatttgatataattaggaagcgtaatcgtcaagatataaaccctataatataagcatttatttgatttgcgataagtacttgatttaacgatagcccctgctcttgtacctgagctagcaaataaagagagagaacttgcggtctgtacgcgtgctctctcatgtatataattgtgacagttatttataaataggtgtcgaagtaggtaagctatgtcctttccgttgactaggaaccgctctctgggctttgtagggagcttatattccactatgagttcggttctaatatacttttgtttttgttagtagcgagctcctaaaaggataattgttacctcttatattaagaatgttgtccttaacttccttgggaagggatcgagaagtttctcgctcccacttcgatgtaaagctggtgaagtgattataagctgactgctaagacggaacctttttatacgatttgatataaaactctacgaaaagtttcaaaagttcaggagtcggaacaggcaggttaggaaaattcgggtctgtggactcgttacgggaaatcctccatctactaataattaggaaccaaaatcggcgaaatccgagcgaagcttacagtgcctaattgtcaactgtacggttatatttttctagcgtagcaggcgctagctcagggtggcacacagtattaccctctttttccttctcgtcttgatagtcacgtgtgaagccatgtgatatcgcacgtgcgagacgctcctggagtgctttcgggatattcttttcggagaacatgttttagctggtaaagagattcaaagaaaatcatggcagagtaagagaagcgcctcggggcttgactatttgtatttgtcttagggctaacatagatttggagtgagttggcccctatcacctcaagggtgagaattgtcaccccgttctcacctttctcacccagtctcaagtcttctcacccatatcacccgcactcaccctagagtgccgcttaggtgctgagggcacattgagtattggccgtgcagaatatgtggcttaagtacggctgagcggacgggaagccctgttttccacaccctatggtcgtatgtatcagatcgtgtttcgaggaggtttatagcgtactattgcaagggttggatgtgaggatgctaacaacaccacaatgcttgtcgctaattggagatccaatcagagtggtcgaggtcttgggcaatatggtattggtcgattaaaccggaaaattcatgcacgttgggcgatcctctgcagttcaaaatgagaaatcctcgagatactcgctagttggtacaacataattgtctgcgcgtcggcatataacagttacatatctcactcacacgatgaccacaatcctctttgttcctggtgcttggaccgctcggacgttctacgaaccatttctccaagctctcacggtcgctggctacgatgtccactacgcggggtacccctctgtagactcctcggacccgttggtcactgattgccaagccgacaccgatgctattacgactattctccagtctctcgtggaggatcagggcaaagatgttgtgctctttttgtattcctatggcggcatgcctggatccgccgcggctaccgggctagccaaagcgcagcgggctcaagagggcaaagcaggtggtgtgattggactgctgttcctgggcgctttcatcgtacccgagggtattagttgtgccggtgcccagggtggaatcctgcccccctgggtcttacacgatcaggtaagaggacctcctcgtccccactatagttatataatgcattttgctgacatgttgcagccctccgcgaatcttgctgtcgtggataaccccattaaaatcttcgctgccgatgttgatgcggtcttcgcccagtccctgaccgcaggactcagaccgcatgcgaccttagctttcaattcgccccagccccatccggcctgggcggacgaagcgttccgagggcgtttggcgttcatcgtcaccactgaggattgtgcggtgccaagggaggcgcaattcggcatgatggcctccacgcagcaggcgtggattgtcagggaagtggtgtccagtcattgcgcgccattcctgaatcggatcaacgagacggtggaacttactcgggagatcattggccaattcctataaagggaaacatactttcacttggggttaggttgctatgggcttttcgtgcaggtcaccaggctccgacaccaaatccaacaaccatgcaaactttgttgaattgcccgtctatatataccaagaaataaccgcttcacggtggacatatttccatagaaagggacattagaaataccttgagtagaaaatactgtcttcagttatcccgagttacgactacagtacgaagagagacatttaattccaaaccgtctgtacaatttatttcgtatcttcgtgcacctctaggtaatattcatttgcgaccgagactcatttctgagatgcctcttccatagccctcaaaaagcaagccttatcaataggccgcccattcttctggcttcctttccacgctcgtcgctggttgaccttccaagcagagtcactcttgtgtgcctcctttttcttttcatcaccgaggtctagcttcataatcaacagacgcaacgcccaattctctataccaccagctttctgttcggtctccataagcaggcgtagcagttcgatgtgcaattttctcaacacggccttcgtttgagagaatgccccccgagcagtgatctcctccagtatgtactgtttcatctcaggtgacagggtttctcccttttgggatcccttaaacacgcttgacaacgctgtgttggagaatcctggcgactgcattgataagatgattgggaaagatagcttcccttcgtcgagatcatcacagaagcccttgttttttgtgtactaaagcaacatgttagttaggatttgtgtttagaaacacagtgtggggatttgttacatcgtcgctttgaaggttctggtagtcatctcggatctggaaatgtcttccaagcaacgtcgcaaactgacttatatcaaggtccctaggatatattagcctgatcttattttcttgtgcgatgagcgttaaaatacctattcaccgtcgcctcggatctcatcagacgactaataagacggaataaaccaccagtctctgtgtaatggtcagtaaattggtgtataaagatggatgcgccaatacgtactgccgtcaaccatgctgatatactgcgcaggggtcggcacatgcgtatggtagctccagtggagatcgcgtccctgcccaagctgtaggttacgcatttcatctagcactgtcagttcgagaaatctcaagcaaatatgccgggataatctacctgtgtaaactaaaaccgcagacggggaaagcatctgtacgagatacaaggcttcgttcatgagatatgtcgcagtattgatggtttggccaacgccaaatatctgatgcgccactggccttccgcgtctgaggacacttccatcctggatgtcatcgagtctatttcgaggtcagtaaggaaaacaattgcaggttggaatgggcccggttacaataatgatgagttgtgtaggaagttaactgcaccctctatgatcaggagggacttcacgggcaccttgtaccatgagttcagagccgctatcattgtctgtctcacgttcttagaaggcagagagttgatgtaggtgtagggatttaacacgggctgtggatttctagttagcacttaggtctccttgtctccagcgactcttgcggatagaaacttacctcatcgattgtgggatacccagatgtgtacttggccaggacatcactctctgctgtgttgtctgaaatattgttagtctcgtttgccggattgaaaccaactgagatagcgtgttatactcacttgacttaggttcttggagttcaatctctttagtaccattaatctcttgttttgagtcacgaaggtgctcttcaggcgtgagaactcgcacagcctcgctgccaaacttctcaaggtggtctttatacggattccgttcaaccttgaagtaacgaggaacacacagactccaaacccagtttccagccattgaatgctcgagcagtttcagccagctgaggattgaatctgatggactagccgtcgccttgtactgttccttcaagtaacaaaatcgctcttcgtgggctcggatctccgcttggacaactgcctttgctgcgcagtgcgtcaggccttgtgtaactgcgacaatatgtaccgcattgactaatggcacctcgccattgcttttcacatgagcgtcgtattccttgtcccaagagaacaagtcatttaccaggcataattccgcatatgcgacgtagctcataggatcagcgattttttcttcctcgggggtgagtgtgatgcctgatccccatcggaaattataaagtgtccagcttggaataatcagattgagttctcaacttcggaatggggtgacatactctgctgctgcatcaacaattctgaactccaggtagtcatccagactgggaaattcaagactcctcacgtcctgtaccgaggcagtgaatgtttgccacgctttaaggaaaaattcgccgaacacgggatccaaacgcaggtactcggccgcaatcttggcctggacctcggatttgcgttgtgctttagctgaaaccctgttcgatacagaagtcatactgctctgattaatagcctggtgaagcattttgttttcgagcaacaactaaatcgcgcgtcagtttcttgatccgcatacatagaatgatttatcatacagcttcttgatcagcggcattatcggtttcatctaactcgatgttagttgcggcatatagagtgatttattcccacgtaccatcatgaaggaatgcatattccacagtgtaagcgacaagcgcaagtctttcgggtaggcagttaggcgcacacagtgaggtaaaattacccgcgtgtgcattgagattgccaaacttcgacccaacggcgtcaattccattgaggtctatgtggcattgtactgaaacatgatcggcaattatcgtttgtttgtgaatatatggggtaaagagagaggagtatgccggattattggcgtagatctcgggatcaatgctctccgcatacacgtcggctattgtttcgcccatgttcaatgttgctttgtgattcgagaaaataccgagctgcacgatgcacatgcaacagccgagggggcccgggtggtataaataatcgaattagaaaaagtaaaccacccttgctaagacaggtgcgctagtttagcccggcactataaacgtcctcttccgatgccggttcattcgtttctaccgtacgatatacgaagtacgcgcaagggaggctaccactttgcaccggacaagtcccacaataatcaacgtgtctagcagccaatgacaccaattggctccgccttgacacatacaacatgagtgagacaagaaccaactatgatctccactagaagtaaatctaaagcacgttttcatccgaggctcctatctcgatagaaactgagcaattgactcgcgcacaaattcgagtgacgatcatgtaccttttacgtctactcttgcctatttgagtgcgaatctaacttgttactatcaaggacagcacgccatgggggttatgccaagcgggatatccacagcgaaaggagcattgaaaatcataatctcggttgggggccgttacttttagtgcacttcgtgcaaacgggtcgcaccaataagaaacaagcacgttagtgcatcgtggagtcttttgctcgttatctgggctatttacaaccggcaggatcggagggacctttgcgaaacggccgacgccatgagccacgccttggccggcgcttgtacgctctaatttggcgagttacatggcgggaaatgtggagatggtggagatgagagtcgggaagattgaaagattcccttagtagcccagatggagtatggagcagtaaaaagtacatctgcgtctagacaagatcttcctcagggtttcctatctgagctgtcgctgcttttacgagttcccgaggtagaggagatgtcagcacgaggggtcagtcacgtgggaatgagatgcttagtgatttagactataccaagaagggattagcgtctagatatcgatttacggaggacggagtactccgtacaaaggtcatcattctgttcgatatagacaagtcaaaaggccagttcatgattcgatgaattatcaatagtaatcaaatcttcgccgagcgggagaccgacgtggattcgcccaaaaagatcaatcgatcaatggcagactcgtgctgccaagaggacttcaaggcatctttagtacctgcaagtgcttgtgagcgcacccacctagatgctatctgtgtcgcacgctcatcgccatcggatgatgcatcgtaaaggaccaaacatgaggacactatggcagcaatatgttgcaggatctccctgtcgcgccacaggagttcgtccctgttagtactctgtgtaatttcgagcagagcgtttagtcttccttccacagtaacgcattcctcggcgaaccccgattggcagcccttcaaaatatcctttgtccattcaaccaaaactgagcctgccgacttcttaccctgcaagcgtttgtcggtaagaactcgaataacatcctccgccataacactgactgtgccctcccagatggcattgacagtggtatctcggaaaatcttggcgatgttcagaataccgccatcttcattattttcgcagtacccaaccccgcccaggcattccatgcaggcccgaagtccatgaaccgcgttcacactaacagtggccttcaatgcgggtgttatcagacgcaggagagtggcagccttgacaggatcctgcgggataagtccagcagctttggtactgctgaccatggagtcccaattctgctccatggtaccctgcagtgcgaccccgaagaatgccaaatgcattgccgcagagtaattgactgtctcgtccgccatccaccgcacgtgctgcacattatcctgcaaaagcgctccacgcgtcttgcggacacgagtgtacgcccggcaaatggatagtccgcggccccaaccagctgctgatacacctgcgcagtagagtcgggtgatgttaagaacggtcgagatggcattgactcccctaccttcctctcccaccagccaaccacggacccccttcaattccaactccgctgtgggtagggacttggtgcccagcttgctcttcaaacgctggatacgaatgccgttcagctcgctcgcgtcactgttctttccggagcggcgccgcatgggtgcaaggaagaggctgagacccttctcggtctgcgcaagcagcatggccatgtcggagtcagtggcgctgctgaaccacttgaatccgtcgatgcgccacgggcccaactgcaacccatgagcatccacatctcgtccctgttcggcatctcgtgagatctcttctgccgtcaaccgccacgccagcgtctccgtttcccgaacatcactgccgcccgttctctccgtcatccattgtcctgttgtccaggcctcaccgggaatatctgatacaagacgtctgtatgcttcttgcaagaccgcgcggcggccgggctgatcaccgtccacgtcgtccagccgtgccgccaacaatttagccgctccgtccgtcatcgagccaggacaccccgtcatcgcagcactgggtgaccagacatggttcattgcgaactgttgcacgcgtcgattccattgttcattgctcttcttgtaggcgactgcaaccaagccctcctcttgtgcgatggctgtcagctttctccacccttctccggtgattaacgggtcgacacgattctggatgccgaaggtactaagtggtcggatgatgggctgattcacctcggcatcggtggccaagttcaggatagccggatccagtgcacgacgcgataggttgtggactgagacgccaacaggggattcccgcggcaggtagagattgagaattctcgcaagggctatatcatccgaagcggccagggagcttgagtttgctgacccatcgttgacgaaggtatatgctggaggaaccgtggggatggactgaaagaagccatccgtagacgatgaaggttttctgccggtcgagtgtaccatcatgcttgttcaatttgtatttgcggggaaataaagttggggtatcggtttacggcttgggtgcacgctatataagcaccggatagcgtccatcagtaccgaggttccccatgtgggactcgtttttgatatcctagttccaccggatatctgacttccaccggatgtaccttgaatcctattggtgagcgaggagctctgtccccacaacttgagtataccatatctattccaccggatataacccagctggcaattccagagtcagttccacgtagaacataaagtaaatcattgtcttcatatgcatgtgcaagatatttacttccaattcctcaattcgcaaccatgtcttcttgcactatctacaaccctgtgaaggactatactatacccaatacagacctactgtccctcgtctttggtgagaattctacattaatcgagacatacagtctctaattatgaatagaccaccccgacgtactagcaaaagatgataccatcctccatgtggaaggtgcagacagcagcaacagtatcaccaagtcacaatgccgcgagtacaccatgcgaatcgcccacattctgcgcgagaagtttgcgattggcgcccaaggtccagggatcgataccgtttgttgcatctcgaccggacaagttcttctcccctcgcttttctacggcgtgattgccgcgggcggggtgtacagtgcggctagctcgagcttcacggccggagagctggcacgacaggtgaaacacggagaatctcgactcattgttactagcaaggactgcatcaaagtttccttcaaagctgccgctgaatgtggaatcccactggatagggtgttggttctagatagttcacgtggacagagaagtcttcgagatggacacgggaaggaactgctccatgagtccaccggacagctggcttgggaggtgatttctgatcaacagatcctgcatgatagggccgcctgtctgatttacagcagcggaacaactggcgagcctaagggttagttgcgtcgctccttttgtggttcataactaatcaagacccaggcgttgaaattacacatgagaatctggtgtccgctgccgtcgtgaacctctacgcctaccgcgattacatatccagacaaaaagctcaaaccccagacttcacaccagaataccggacagtcgcacacctcccggcagcgcacatcgccggctgccagggctatttcctgcaaccggtgctatgcggcggaacagtgtactggatgtccaagtttgagccgaaaagctttctctggaactgtgcgacatatcgtcccacgttcctctttaccgtcccaccaatctaccagttactggtacaaagcccattggtgaatgatcaatttaagcatatgatccatgcggtatctggtgcggcgcccatgggaccggatttggtcgtgcgagcaaccaagacactgggatgtcccgtttcacaaacttggggtcttagtgagacaactggtagtgtcaccatctctccctgggacgaattcgagtctgatggaagtctctcgcctctgcttccgaatattcggctgcgcatcgttgacgaggccgagaatgatgtcgaagacggacaggagggagagttcatcgtccaaggtccaatggttacaaaggggtattggaaaaacgaagaagccacgcgagcgagcttcacagccgatggagcatggttcaagaccggcgacttgggattgcgacgaaatgggaggatcttcatcatcgaccggaagaaggtgagcgactatacctcaagcattgaagtaatttctgacagtttcggttgcacttcaggagatgatcaagtataagggtcttcaagtcgcaccagcagagttggaaggtcttttgctatcgcattcattaattcaggatgtcgctgtcattggagttccggatgtcaacatggcgggaaatgagcttccccgtgcgtatgtggtggctaatcagagcaaaatcacggaagatgccatcaaaagcttcattaaagataatcttgcctcgcataagcaattgaggggtggtgttatcttcgtacctgagattcccaagagcccgactggcaaaatccttcgaaaggagctgcgagctgctgcgatgggagccaaggcgaagctatgaagcggagccgaggttgtatatcacgtgacctcaaatcaatagacaattcctgtctactttcagacaaccgtcagtaaatattgtactcaatagcaaatagagttgaatataacaccgtcaatcatacataccttttaccagtacgaggagtagatccttggcatcctatgacataaacatttgacttccgagctccaccggatgtcagatccctcccaatatccaacccttgtattccgctgttatggcgccctccagggtccgatctgcctgtgcaagatgccgacggcaaaaactcaaggtcttcctttcttgtcatacatcacggattctacttactctttacagtgtgatgatacccgaccctgccagctgtgcattcgctccgatgcagaatgtacggatgttataaacaagcgacgaaggtgagtaggacgcaccatagcataatatatattctaataattatagaaaaaataccagagctcagtcacaaagcagaaagccgcctgagaatcgtccactgctcacggaaacggccccttcgcacgatcccagccccggtctacagacgcatgttgggcccggtggcaatcatgctacagatctggtcaccagccagcgagagcgagcccactcaacctttcatcatgcccaggaggtaagattatgtactgtcaagcttttcttctgctgctctaaccccatcagctttttcgcaatcatatgaccaccttgcgggactctgatgccattcctgacggggcccccgcaaacaagctgcctcaagttcaaggatcgagaataccaattttcgacataattgggatgcagctcccgtcgacacccgttactctggcattattagacgcatatctccaagcgaatcactggtacctttccatgtttcatgagcccagctttcgcgcacgtctggtcaccatccttcggactgagggtattctcccctgtgagaagtcatttttattgttattgctagctgtcttaattcttggagcccggttttctaatcacgataccctacattccctggactcacagtttaatcttcagcagtgcaaggcaacgtggatcaaggctgtggaggatcatatattctggattctaaaagaagccacgctagaatcaatcgcctgtgccgttctcatgtccattgagtaccttttagaacgcaagacgcagctctcctttaccatgtcaggactgggatcgcgagcggcgcaggcgatgagccttcatgacgaggccacgtgggaaccactagatttcattgaaatacaggtgcgccgacgagtttggtggtccatctacatggtcgatgtgtgagttgagcaactatttgtacacatacgaagcaacctaacacgttccagatatatcgcacaagcgtacgggaaaccatcagtcctcccaaccgtacagttcaacgtttgcgagccaaaagatctagatgatacgatggccacctgcccggggatcggatcatacgaggtacgagaagacggcacgttcaagcctgtgacgatattctcgtacaaccgctacaaagcacagctgtactcgattgccgatccaacggcgcatagtatacgtttacctcatatcaagcgcacctatgcccgtctcctggattgggaaaagaccgtcccacgagagctcaagcttggcagcttttcggaggatcagagcatgatcgatgaccctgctcggcgtgttttttccctgcaggcactaacgctacaggtgtcttatgactacaaacacctgatattgtttcgccctttccttctcagtaggaaatacctcagtgtccgattacacgatggcccgatcgaatcgcaagatagatccgataccacgatccgtgaccaattattcacttctgccttgcgcatgtcgagcatctgtcggtggcaaaatattttatctattcttgggaacaccacctctgccgttcaactctgtttccagtgcttcacagcgggtgtggtactggcgatgctggccttatctgaactgtcctccccacgactgtctgaatgcaagcaaggactggcccgtctcattaaatctctggaagtggcaggttcgggcagtcctttatcccgacaaagtgtcgatatcctgatggaagccatgcatcttatctcggccgaggaagtcaaggagctagtctccagggcgggcaaaccagcggaagatctacgcgatgttgtatcagactcagtcacatggtcggcggacagctgcggggcgagtgatgcgcagcatgcaatgcagccagatgcagtgcatgggccaggcatatgggcggagttggacttgacgccggatgaaagcgagccggaaatactcaactccatctctctataccaatcgcttgcgtctttgttctagccaatacctgtcatataacggtaatagcatggaatgcaggcctgtgtacaacactcatcacggacagcggacttcaacgatctctacatttttagtgcggtgggtcctaccgcgaggctacatctgggcatttgcatattgatgtgtaccttgttaatttatgatatctacataacgggcaacgttcaactgtttccgaggttgaaaggcctaccaattccaagacgatctagccctggacccgtgtgtgattacgtcagccggtgcgtgctcagttctacccgctgacaaaaagcggcaagagatgagcctaaaatggaaaacggaaggttttcttaggagggcccaaaacatgcacaacctgccttagtgtatgcatctcgacgagtttgtatagaacaaaacttgtcgaattattatcgtcggcccgatgccaatccgatacgattgtgtagtatcccattggtctacgtggtcaccctcgatactaactaaacatgcccaggagcctcacaagcattttccgaatctgaattgaagctcctacaagagttgtacgctgcgatatgcaatgttccggctgtttcagagatatattaatatttttcacatggaatcctcacggcagacccctgtcaccacggatacccacatcgcggtcgcgcaagccgttcgaatccttgcacaaaagtagcgccggggcacattggcttgggatccgaacaaaattacaattctgtggctaaacttccagtggggattcggaagtatgccacgtagcaatcgttagctcttctacggagtgctccgtactcggcatccaatcccagctagagcaattggtcaacattctcaattcggatttatacaatcataatcccttgtggtaggtgaattgtctctcaaactttagccgctcaattttcagcatcgagcacatcatcgccatgctattactgtggtttggcttcttttccttcatttttggggtggtgatctatcgactatatttccatcctctcagcaagttcccggggccgaaactagctgccctaacaagtctttatgaattttattacaatgtggtcctgggtggccggtatttgtgggagatagagagaatgcatgagaaatatggtaagaacattattcgagacactggatcatatgtcaatactaaacattttcgaggtcctattgtgcgcattactccccacgagcttcatgtggcagatccaaacttctatacggaaatctatgcaggccctaccaggaggcgggacaaagacccaagacttgtgcgactagcaggccaaccaacttccatgttcgcgactgttgatcatggcctgcacagttcgcgtcgagctatcctgaacagctatttctccaaaaagtcaatcgcaggcttagaagacatgatccagggcaaggtgcaaaagcttgtcaagcggctgagcatggcctgtgatcaaggcacagttgtaaagctggatgctgcgtcttcggctctgactgcggatattatctcggagtacgcgcatggtgtgagtcttgactacttggacgatgtcaatttcaataatgaagttgcggactccatattaagtcttgcgtctgtagttcatgtgttgaagttcttccctttccttttggatctttcaaagttcatccctgataaggtgcttgagaagctttggttccatgcagccaacattttgcgactacagaaactggttcgtgctcaagccgacgtcgcactccaaaatggaggtaaagtggatggtcaagcaacaatgttcggtgctctctgtgacccatccttgcctgtgcaggaaagaacattggatcggttgcaggacgaaggcttttcgttgattggtggaggcacggagactacaacaggaacattgaagattgtcatgttccacttgctcaatgagaaggcattacttctcaagctccgcgaggagctcgagcaatacccatctagcacatgggccgaccttgaaaaactgccctacatggtgagcaatgcaatatggtatgccaaggcgagactaatcaatgaaatttgttcagagaggaacgataaatgagggacttcggctctccggcgtcataactcgccttccccggcgtgcacccgatgaagccttggtatacaagcaatggacaattccaccaaacgtaagctcatatattctccgagatgaacaacactaacgcgcctcaaagtccctgatgagcacatcgtctcattttgttcacacaaattcggacctgttccctaatccgcttgcctttgaccctgagcgctggatccgggctgaagcggccggccaacgcctggagcatatgattgtcaccttcagcaagggctctaggcaatgcatgggtaaccagtaagataaactcacttcctcctggattctcaaacttaccagtgatctagtttggctttggcagagttgtacctggtcatttccacgctggtgcggagattcgatatggatctatatggggtgacggcagataacatcgtcacgcatcgggagtatggctttggcgttccaaaagaaagaggtgaaggattaagagttagtattacacgggttcgtgacccgtagtttgtatcgtttgacatatactctttcgtatatatatcgagagtgggcttatacgcgatcatgttaacactgggcacggctcaaaaaatgatattttatacaaatttcacgaccctgcacaaaagagaaaccaaagcaacaaccaagctataatcgcacatggtcagcacataaatctcaaagtaaccggacacatccactaagccacattctactcattttttatcaattctaggaccatcttcagactatttatacattgattgcattcgcttaaagcaaacacactcacactcgaacccacgaggctagcatcaatattcactaccataccactaatctatcaaaccgcaggcatggcaggacacagggcgtctgacgagttccgcgaggaacatgctaatttctggaccctcatgcagcaaattattcatggccttagaaacaactacccatcaaaccaggacaaagtcattggctggatgggccaactcaatctccaactctcgacccttcgacgagccggagagatgatggggttgagttatccacctagcgacgtcgtcctcgatgctccacctcagtacttcactgcccgcgctcagcgccatcaaaattacttcggtaccaactttgggtactcctgctggtatacccaaggccagctaggctacgccattgcagaccttctccaccagcgagatcacacccgtgtagccgaccagttggagcagttgctggcgagttggcaattgaccgagatgagagcatttcctcgccatctcactactcacaatcatgtcgagcacccggccgatatcgtgcatattgatggtccaccatactatacaccaggcgctgggcgcagcaagacagagactgggccagtccgtgtccatattactatgcctgctccaaccgatactatttacggcgtggcacagcagactcgccatcgccctgcaccataccttgaacgaggtgctcgcccgagacatcgtgggaatgctaggctaatcccgccgatgcctaagatggacctccaactcccgaatatcatgcataatagcgatattcgccatgctccactgccgactcttcctgctgttcgttcctttttcactccatacagcattcccggacatgctctgttcggtataccaaatatgtctgtgccacccctacgtggtatgcagtacccgtctattgtgccagccccggatactggtgattcattgtctgttttgaatgcccatgtcggggagactttgaataaacacctgttctgtcgggatggcgttcgctgttgagatagtgggcaatctagctcgtttgagctttttaattggaccctgggtcaccacaatgcatgctttggtattgactaccactgagtttaagaactccggttgacttgtggttattgctaacgctgattttgattggtaggttcttatactcccttgtgctttgatcgactatggattgcgccctctcttttggaaaaaaataaaatgataatggcctgtatggaatcagaacgctttatacacacaagaaattgatgcctggaagagctagtcgccatagtcctccggggatgttcctgaataaatttcgggttatgtacttccaaagttaggagccttgagcgcaatagaatttatagcaggtattcactaaatatggatcttagtcggttaaattaaataactagagatagctttgcaacttctaccaatacgagcatattttcggtgtgaagtacaagatcgatgagcaataaacaggggttattaggctgttcagcgaatacggctttattcctgctcgtattcacatactccgtatatctgtgtagtatcgatctaaatagtaagtgacttccttggtataaagacaaggaaccttgtgcgccgtttcggttatggttagatcggtggattcctcaaccgggatctgaatggcttgtatattcttattcagacaatttgtgaatctctcaataacaaccttggtagtatacttgtctagtcaaaagtaaacagttggttaatatatgtttgtaaagtggtatgttggccagaaggattgcacctcctatacgaggtacatgtatataaccttgcaatatactatacaacatactatacatggcaccacatcagtccatcgccttccatcttgccactttccaaatgtgttgaacctcaacaagccagccaatcaggggccaggatcagtcaggccattatcatttcttggcggccgatctccgcggatattatttggaggccagcttgtccacttcagtcagcagacactgacattcttgattcttctattcttttctaatattattgagattcttttttctcttttcaagctatcactgcgtagacttcacggcttacctccaacgacagaccctcgcgttgattctctggcctttgcgccaccttgcatatacaacaaccggacgactacgtgcttgatcatacaccacagtcggagaccaagatgcggtctgcagcgaggctgctctatgcagcagtgtttgcgcttgctagcttgagccatgccgccgttcataatcctgcattggacccaactaagtgtgctgtaagtcttatcaggaccgaggataccaacacagatgactgacagtacctagatcgaaccttcggccatggtatccgatgcgtgtgtcacatacggcgagatcaacggcatgaatgacctgattttcacgacgctcaactccctcacacaagaaacggactttttctcctactatcgcctcaacctgttcaatagacaatgtcccttctggaacgacgccaatagcatgtgtggcaacattgcctgtgccgtgaacactatcgactcagaggaggatattccgctgacgtggcgcgctgaagaactcagcaaactagagggcccgaaggcgaaccacccacctcgcaatattcaagccgagcggccgaaagaacgcccgctacagggagagctgggtgaagatgtcggcgagagctgtgtggtggaatatgatgacgaatgtgaggaacgagactactgtgtccccgaggacgagggttccgccgggaaaggagactatgtgagcttggtggataatccggagcggttcacgggatactctggagaaggtgcaaaccaagtgtgggatgccatctaccgcgaaaactgcttcttgaagcccgtggctgaggagctggaggagcagtcggtcaacgttccaataggcggcctccaggcagcctctgacttccgcgacgttctccaaaaggaatcgcagcgggtagaaagcctgtcgcttgataacgagtgcttggagaagcgagtcttccaccggctgctgagcggcatgcacgcttctatctcgacccatctgtgctgggactacctcaaccaaaccaccggcctgtggcaccccaacgtgcaatgcttcaaggatcgactccttgaccacccggagcgcatctcaaacatgtacttcaactacgcactagtctcgcgcgccgtggccaaactccgtaagcacctggacgggtacacatactgcgccagcgacccagtgcaagaccgtgagaccaaaaagcgcgtcaacaagctaacagcgaccttgacggagcttcctcaaatcttcgacgagaagatcatgttccaggacgccaacgccatcggcctgaaagaagacttccgcaaccgcttccgcaacgtcagtcgccttatggactgcgtcggctgcgacaagtgccgcctctggggcaagctccaggtaaacgggtacggaaccgcgctcaaggtgttgttcgagtacgacgaaaccaagaacggcgagaacccgcccctgcgccgcaccgagctggtcgctctcatcaacacactcggccgcatctcgcacagtatcgctgcttcgcgcagtatgcagcgcgctctgctgaccggcaccacccacatgttccccgtccacggcgccgtaccctcctctcaccacgccaacgccctcggcgacaacagacgcgtgttcagcgacggcaataacaacttctatttcgaaggtgaagataacgaagatgattatgtctacggccgaggcgccgcgccagaacggtacccctgggagcgcaaaccgcctggcccagacgatggctgggtcgaggatttcatgtccgagtggaatatgatctggggtacggttgggtatatctggcagtcttggttggacatcccatttacaatgtaagttgctcttgatctggttattggatagactgactgactcttgcagttaccaaatcggcacgtcggagttcatccgactgtacaattattggctcggattgccggtgcctcctcgcatgtggaagctgaagacgccgcagccgcgtgcacatactcaacctgctgcctatgctaatcgtgacgagttatgagttctgtatttcatctttgcattggcatttgtacatatggctctgtgctatggcgttgatagactttgtctgaatggttttgtttcagtacttgaatatatactccttaatgttcaggttattttgcctcgcttcgctcaacaaactattggagttatatgttcagtgtagttttgggtgttacaaagtacatattgaagctaaaatatagagacggatgtgaataagtctgctagtgtctagatatgtataagtatgactagacgacttatatctacttcaatccttcgctcatctccatctcaaacttcggtcgcccccaggtacatgcatttgccaccgaaaagatttcttccgtacaggcggaagagcgaaccgggcaggggacaggctgagcaaacaggatggacaagagaagtctgctagttaattagacatcgctgcttattacagagccaggcattagaggatcgtccttgtgaaaattatgaagaagatctacctaggcgttgtctagttgtaggtaataccccgtgttctcggcaaaccccgacctcggcatctccaccacatgcgtcttttcttccatcttctctcatcgctcaccccccagcctcgcggcgaatccatctgaacagacgtatatcgtatctcgatgctattccgctaatatccaactccatggcgacgccttcgccaccaaaaccgtgggagcgagccggtgcagctggtaagtgtcttctcgattgccgatatcctagcgccacagagtcagcgcaatccacagtgtccacaactaacttccttcctcaggaaacgcactatcaacagcacctatcgccggtagccctgctgcctcgaccgcgatgacttctacagccaaccccgcatcgtccaccgcccccgaacttccctcccgtccgagcgctctcaactccgtagttaacaactcgccatatggagcctcacgccttggaacaggcgcgtacggatccagctacggaggcatgggcgggatgggtggcatggcttcaccttactcccgcttcggctctatgggcactatgggctccatgtacggcggtggcggctacggaggctacggaggtggcatgtacgggggcatgggcggtatggggggaatgggagggatgggagggatgtacggtggcatgccgggacaagatcctaatgatccgaacagcctgacgaactcgttcgggcagagcacacaggccactttcgtcatgattgagagtattgttggtgcgtttggtggctttgcccagatgctcgagagcacgtacatggctacgcacagttcattctttggttagttccctggaagaaatacatgatacatggacactgctgacttttttagcaatggtctcggtcgcggaacaatttggaaacctgcgaaacacactcggctcggccctgggcattttcaccctcattcggtggttccgcacattgatcgctaagctcaccgggcgtcctccgccagctgatgcgacttccttgaccccggctgcttttgcggctttcctcggcggtcacgccgctgctacactcccccgcggcnnnnnnnnnnnnnnnnnnnnnnnnnnnnnnnnnnnnnnnnnnnnnnnnnnnnnnnnnnnnnnnnnnnnnnnnnnnnnnnnnnnnnnnnnnnnnnnnnnnnnnnnnnnnnnnnnnnnnnnnnnnnnnnnnnnnnnnnnnnnnnnnnnnnnnnnnnnnnnnnnnnnnnnnnnnnnnnnnnnnnnnnnnnnnnnnnnnnggcgggcacgccgctgctacactcccggatggctcaccggttcccgccaagccatccaagaagccattcttcatgtttttgattgccctctttggcctcccttacctcatgggcaagctcatcaagaccatggcccgatcccaggaggaagaggcgaaacgtcgccagctcgtgggtgttggggccgagggcccagcatcgctcgacccggccaagctggacttctgccgtctcctctacgactacacccccgagacccaggagagcaacggcattgacctggccgtgaagaagggtgacattgttgctgttctcagcaagtcggatcctatgggcaatgcctccgagtggtggcgctgccgtgctcgcgacggccgcgtcggatatctccccggcccgtacctggagactatccagcgccgacctactcagcaggctatcacaacaggcagcgagcctgctactcccactactacgatgaggggcgaccccgcaggccgcacacagagcctgtcgtcactgagcaagcccgagctcaacaccaagatgggcgatatcacgcctgagagcttccagaagagcacgttctactcatgagctatgctagacttgcttggctttctccttggtccttgtctttgaaatagacaagttggaacagtatatgattttttatagtgacgtgaaccggccaaaaactcccctttgagctttgctcatctttatatatcccctcgcgtgccttgatcttctcgatctcttatgaccagctgtgcaggtagcaccttgctctgcctggctcagtattctccccagcgcttcccctctttgtccatttgcttcctctccttctgtcggcttgaattcgtttagcgatctctcattggctttgtatttagtacttattagtgcatgcacacacatccacgcaacctctcccactagttctagttcgaaacaaaagcccctcttcctaacaaaagtacctatcctttcccatccaacatcccataatcctcctcgtggactatcgtctggcccacagtgggccatgccattcccgtcccgtcccggcacatatccgtatccgtccccaccgacatttgacatttgacattgacatttgacagtcgatacatcgaatatcattcttgactactcaatatgtatactgccgttgcaatagatacatcgtatatcattgtcgactacccaatatatacatatgtccaaggtacaacgtacaatgtatgtagtatgtacttctggagtaaggaaggtaaggggctgaaagtcgtgtccctttaccctgcgctgattgtgggacatttgtacggagtactttgtctaaatagtgggttttaccacccacatacctgccttggagaaatattgatgtgccgtgtcgtcattatggtactttctttcgtagttgatctacggagtaaaacgaggttaaacgcttagatgggtctcgttcatcaggtttcgtttcattgcgctatactttctacgattccttctgtccggttgtgtcacgtcgcgaagtatgtacgtttacgtggatgtgtatatgatcgccggtgatctgcgtgtcagggctatgtacttagccactatgtataatcgaatagaagtgtaggatgagtcaaacgtagtgtagtgtcgatcgatatgttatgcatgggaatcccagaaaatatatgaggcgtggagtacggagtacacagatgacagtgtccggatggagcgagtatgatggagcgaatgtgccggggttggtcggggtaataggcacagggcggggttgagtcgtaaaatgaaaatgaaaatgaaatgccgagcagattcagattcgggttgcagtatcttccagggttgtgtctgagaaaagaaatatcatgtcgggtgagacatgacgagactgactgggacagggacagggactgagccggggtgttcagtgtcagttgataagaacagggacaatatcggtcgagcggatggagtatcgttgtggagctgatgcccctttcgtgctacccatacttgagaagcaggacagatatgcgagatatgttggatacagaaaatcagatgccatgcatagaatagatcatcaatctagaacgcgaatacccatatccatatccatatccataataagaacgcccgtgctatgagtcttcctccgttggctaagtttggaagggagatgggggtcgggacggagcatgggaaccatatacatcgacaaaggccaaagagacaagaaaacgggctcacacgctgatgggaatggggaaatcaagaaaaaagaaaacaagatggagataatgaggcaaagagaaatgaaaagaaatgaaaagatctcaatcaaccaaaaccgaaccacaacaaaattaactaatcacatccccaatccctcatggtgaggaggctcgtggttagggtcatgatccctagcccacttcgacatcgactgcgtaagcgtaaagtccaaatcctgcaaccgcgtctggaacgactcgaccgtattccagtcaggcggatgggtatcagcttcaccaggcgcatcctcgagatcccgaggcgcaggaccaggacgagcatgcgggtgcgaggtgtgcgtgtgcgcattgtgcacgctgtgggatctgtgtccgctgtgcgcgctctgcccatgcgagctgtgtacagcatgagcggggagcgggctgtgcccatgggggctatgcacatggaccggatgcgggctgtgagcgccgtgcgagtgagaccctgccccgtgcgcgagatggttgcctattgactggtggtaggactggatctggcggggctggtttgggtgcatggacagcggcatggtcgggctttcttccagttccagatcggggaggctttcaaggtggtttgggtctagagcgagatatctgccatcaatatcatgcggtacactcacactcaccggaacggctgtggatttaccgtatgagccgagtgggtaggagggcatttctcgggttggggattgcatgtcggggggtgagatgggggttgtggcgctgtgttcgtctgttggctctggggtgtagcaggtcatgtcggagggggtttctatgggattattagtatgtatgtttggtttgataccgtctagttcatatccatgatgattcactcacgaggctcggggcttgactcggccttttggtccttgccgcggttggtatcccacgttgttccatagcgacgcacgaagcgggcgatgcgcttgggatcgacgttctggccgtttacgcggaaggccgtctgtttgccttgggcggcgcgcttctgttgcttgcgaagcatcagatggacttctttggctttgatgttctttcgaacgtgccatgcggccagacgatctttgtattgtttttctctagagcgagttagatctattcagacgaaggtagaagagaagggtgtattacgatgcaaagaacttataatctctctccataatccgtttcacatcgcgcagtttcaactggtcgttgcggtagagttgctcgatgatttcacgatattcatgccagtcatcggaccggcggggccgaaagacgtttggcgactgaggggagatgggggttgcgtaattattttccatggtgagggtgaggtataggtataggtaggtctagatgaagatgcgaggtcgggttataatataactggaatgcaaatcatgtaataaatgcaaaacaaaatagcccccgtccccctagaaatccgtaaaatccgtaaaatcccaatccgcaaatcgccaaacccccaaatggcccgaaagagcaaagaggaaagagatcaaagccaacgagttctctttggggcgacgtgcacgcggacgcacgatcccctggttccccgggccaatcacatcccagcacttcagacccacacccagctatgacccagctatgaccagccatgtccgcggccgcaacttgggggagaatatctccgggttttggtcttgatgaggtaggagtcttctttgttttgttgattgaattaatggatttgagaggtatttcaatttatttattccatgtatcgcgaattaatatcaaaccaggatgactcgatcacaccgttagctggagacctcgagtggagctgtactttggcctttacgcctaagcgaactattacatgcagtgcactggccgcaaatggatgcattttccgttgcctttttcgttttttcatttcttttacggagccctcggtatggagtacgcagataatacgccgccgagagtccccatctacccctattactgcggtataatacccaatacaaagattacctgcagatccaaaacaccgccgggagcgggccgaatcttccctgacaggtctttgtcttccccgagtctaaaatcctaaaatcccaggggcgtggatcaatcagccacagaatgggagtaatatcgtgtatagtatagtatactatactatagtaaaatacaataataatatatctcaatatgactataactacggagtataaggtgccaatctcaacggaggaaaccgttaaacccgttgacatccaccgcaagaggggaactcactgcgctttgggctctggacaaggttaccctgtccgaccaatctcccaacggtgctgtatatgtatgtatttataggctaaactgttaattataaaccttcgcggccgagactgttatgaaaaacgtacgatgcaaggtccgtgctactgccctttttatttatttattatgatatagtaaaatatgataatatattatttacggaatactccgtactccgtacttcctcccgacagaagtacagaactctgatctatagaatatagtttagatgctggatccctccgttgaacacgtagtacgagcttagcaggggtcactggtaattcaatcctacgctcatctacaacggtgcactgcacttgccccgctatcacctgcacgcgtggcccatatcccaagggctagaatcagcatctcccagggactagtgtcagctgggatcattctgggcgatgggtgctgcactgatctacagggtttcgtttctgggctttcggggagctggaatactagtccccgagagggatagggatgaaagggatctttgctttgagcttggattcttgaatacaacgtggctagttgggtacctcctgacaatccgattccataggggataggggagaacaatgaattgacgatacgccgcgaagcaaaaagaaaagaaaagaaatggaactcctcccgcattgggcctccaagctattcgctagcccccaaatggacatgatcgttcttaaagtgcggggtgtactttggtctctcctataaacaagataaacaatataaaggcatacaagatacatacaacatactaaactcagcacagattaaaaacaaccgcgctttcctgaggggaacacaacggccatcccgcgtggagcccctccactccgagccgcctgtatccggagatatctgccgcggccacgctcataggtccacggaccaccgttcaccggctcggatcgcatgcaggtactaggatgtacggcgcagactggaagggcactgcatgtcggacgcagctcgctcatccgcagacgagacggggaagggattgagaggagtgggggttctcttggcccacgcgctggtaacatcggtcagggggggattggttgggccgagtccagtagtttgtgacaggccaatgaaacggtggggacaggcgttggttgaaacacccagtggcacgtcatggccatcccctataatgtacatgcatagacaaagtacgagagtgatgcgctgggcagtctttaatttcatcctctgcgcgatttttgatttgatttcgatttcgatttcgatttcgatttgattttcgattttcgattttcggtttcccgcattgacatctgatccttgcttttggaaagtttcatgtgttcatggtttattcttggtctgtcgggcttgatccgcggctgcaacggctgcagccgcgacggctgctgagttggaccccgtgctagccagattgctggcatgcgcaaggaggaacttgcagcaagtcagcgtgtacttgcaggctcgagtccacgtctcgtcattctggttgaagcccaacttgatgctggcatctccaatccgatcccgcttgatctcatagggcagctttaatcccggtgcggtggcgccggtctggccgcgccggggagatacaaccggtgcaggggtcttttccacaaacttccccagctgccgcagacactcaaggaacgccaccatgcccgagtcaaagcgacggtgaagccaaggaaggttgagcgggagatcgcccgacgagaacaggtctaattgggtcaccttgggtgcagcgccctcgaccggctggccggctggctgcgtgggatattcaatcttgtcaatccgcgagttggaccccagcggcttgagccgatacccctgaaattggaaccccagcttctcggccatcgtggccagaaggagggcggtttgtccccatgcagcgttgatttcaggccagtcaaccgaaggattggccagccggcccagccgtagtccattgatagtaccgaaatatccatcatgaccaatgcagaacgcgtcattgtagacattcgtccgttgcagtcgctccagctgctgggagtcatgatcataccgcatattgagcgcatcccgttcgttttgaaactcggttagcgtcaacgcaaacgcattgcgcgaccgccagaagctctcctcgtccgcatccaggcggcgcgattcgatttccaagctggcaatctcggcatctagagcagccttttctttctcaaaggcctgcagctcagcgaaggcggctcgttccgcgtcgaggctttcattcaatgatttctgtgccgcctgcacctcctcctcggtcgggatcgacgcgttcaggttcctgagaaaggagatgtaggcgtctcgctccttcgtagaccccgccaagcgtttttgtaatccttccacaagcagctcggtgcattccacgcaaataggatggtcgatatcggagcgcgccgagacgatctcaaacagccgtgtcgttttctccacctgatcaacgagcggcccatcctggtcatgcagctgggcctgtgtatttcgcttgcttccactctcactgaccggtggtggcgcaacttgggactccgtgagcatcacgaatgacatattgccgctatccgcccggggtactgggttgggctggcctgcccgcggcgcagggatagaccgtctgtaaaccggcgacgtagcatgtttagaggactgatcgtacttatcgcggcgttcgtgcggatatgacgatcgcgctgacgaggagacagctccggtatccgacaacgtcttgcctgtagagtctagaccgattagcgggatcaacgatcgcctgtgggatgaacttactagatagcaagtcaaaggcagctgggttgagtgactctaccgagccatccagcttcaacggcgtgcgacacttctggcaatacatggtggttgttgttcatttcggtgtggggagtgaagtcgggggagctcaaggagcttcggcgaacgtcatttgttcctttgcatatttgctcgcgcttgcgcctgcacaccacattctactctactatcaacagatgccaatttgattatgtgttattttactacgcgttcaatgttcgatcacttctaatgcatctatcgatccttctccgaccatgaacccggacagcatggacgaccactccatgcaggacgatatggaacgaccagcgaagagaccatgtttatcatataccccaaccgaggacgacgaggttcccgcggaattcgatctcccagctgcacgcgcacagaatgactcgcgactgaagtctctcttcgaacacattttcgcgaaatatagcaaggacttcacggacgtcggtgatgagattgacctgcagaccggggatatagtggtagacaatggacatctcctgggtatgcggagcgagcacgacgccggccagccgcgatcatggctctcccagggtgatctagaggacccagatgcagacgacgacaccgcgaagggagaggaggatgaattcttctctatggcatcttctcctggtcgttcctcggctccacgcgaagaatcgccatcgaaacagctacagacagacatggacacctctttagacttcgtgtttacatttaaatcatctgggactgcagggcacagtcctacgaccaaggaagaacaagcctcccatccgaccaaccctatcctaccttccaaaccacaagattcaatctgggcagtcccagatctacctgcatccttttcaacccccaccaccgaaacccgcaaaacaaacgcgggcttctcttcacctgccactgccacagccagatccccgtccccgccagggagcggctcaatctgggctgtgcgtagaccccgcaagccacgcacagaaacgaaacccaaggccacgcccagcaagcgtcagccagccgcgaagcgcaagtatcattccagccctgtcacgcgcgactggtcttttgcggaagtgccagatgggaatgagtccgatgacccgttgcaggactatgagccgtcgccgacgccatcgagggttaaaatcattcgtggaaagcgtcgcgttccgactaaggttaatgatggtccttctactccttccaagcggccgactgttgttattgaagttgagcggggtgatcgccaagagggggggtgtggattaagtggccatgcggctgaggtggctgacgcacatcttgaagaacggggctacgaactaagtggtggcgatgaagttcctgatacacatcttgaagaagggggctgtgaatcgagcaatcaggtagatgaagtacggcaatcgatcaatgtatcggaagcacgaaaaagcccgcgaaggtccgatcacatgtccgaccatcaagagagatcggtggctgctacgtggatgaaagctcatttacacgaacaatggaaccaatcgagattcgtcagagaatatcgcgctacttttggtcgaagccgaacttatataaccctgaagagatggatggacgagaaagagaactctcaagcgaagagatgtattgtcataccgaaagttccggttacatgtctgcatgagacgttatcgaatgatagttcttcgtcgccaaccctgggtctttcgaatggtaagctctgtgtgccatcaacctttcggaatgggccccccgaggagtccaaacgtcgctgggacgtagcccctattaagatagaaagtggtctttctagcttgcctgaagcatgccctgaagaagaggaaccgagcattcaggtagacgaggtgcctgaagtacgccccgaagaagagtgctgcgaaccgagccaccaagaagacgaagtgcccgaagaacaactacgagactacgaaccaaatgatgaagaaaacgaagtcaccgaagaacagctgcaaggaggctgtgaacaaaatgaccaaaacgaaacatctggatcagaatataaaaacgaactgccatgtaatcctatggtacacgattcaacccccaagaccacagccagcatggcttcgtccccgcagcccgaaaacaccccaagcaaaaggcagcccatcacacccgacgaagcaaagttgatcgtgtgcatgatgcacaaacaagaaaagaaagccagcgacgtaatgcatatgttgccaggtcgcgaatacccgacagtctggcactggttctacaatcactggacccggcgtcttgccaatccgcctcccctttccgctgcctggtcgcagcctgagctggtatccctgtcccgactcagcacccaatcgggtcttacctggggtcagatacaaagtcgcttcaaggggcgatcccgacacgaggttgagtttgagctgctacgtgcttttgtgggtgagggatttccctctgccatggtagggaacatagaggaacaggcggggccggaagagctgccggcagagctgcagccggaagaaatgcaagacgagataaataatgagccgggatctgaagcggccatgcagcaagccccagatgaggtaggaggtagtaatgctgcatgcgaagacattgcccaggaagagcttaagcagcttggcatccaagaagtgaccaacgccaccgacagtaagacgccacacaacttcttgggtattgttatagatttctgactatagcgatagtgcaaccggattataccaatacggccagtgattgacaatcgacaatctatccacacgtattcataacatgactaccataccattcaatctatatctaatgaaagtcttcgtcctgtgcattcataacatcctcaagcttcgtatcaaccgccccaccaacatcaccagccttggcccagaatttagacagatgccgtgaaccagagtccgaaaggaccgtgacaatccgatgacctgggccaagcctcctcgctgtcttgacagcggcaacacctataaagcaccataagtaaaacacatgtgcgctaggcaaagagggattcaacccacaattcactgcactgctgctcccaataaagatcccatccttctccacaagccaccgcgccatagccaaagcctgtgcatcagtaacccgcaccgcatcatcaatcatctccttccccgcctcgaagttcgccgtgacccggttaatgccaataccttcaacgatagtatcaacctgcggacgccgccgcgtcccctcccgctccttaacatcaaacataacaccgtagaccactcggttgaaaagcccacttccctgcgggtcagccagcacaacattaaggctaggcagcaagggctttaaaaacctggccacgccagaaatagtgccgcctgttccggcgcccgctacaaacgcatcgagccggccaccgcactgagcgtacagctctgggccggtcccttcgtagtgggcgcgccagttagcctcgttctcgaattgatcggcgaaaaagccacggccacgggtcatgggctcgtgtcccgcggggggatcggattgcccttccgctgatgcagatgatgcagagggggttcccgatgaggccgtgtgcgtctttgctagtgctcgtgcgcgattgacaaagttgtctttctccactattggcgctggcggaacccgatccacgattgccccgagtttcagcagcaggtcggatttttcaattgcctggtcggacggcaggcagctgggttgcattggcgttagtgttttttgctattggtgtgatgccagggtggcgcatacgtacatgtgtgctaggtagccttttgcccgggctagtgttgctagggaaatgccggtcgatcccgatgtgccttcgtagattgtgtcgcctgaatggggtgtcagaagaccttgttcttcggcctggttgaggtcagcgatgctggtctagtgcaggaaactttttggtttttgcgtattttagcatacaatctcgatcatgcttagtgccactcggtcttttgagctctggccagcgccattcaggaactgcggcactgttagcgcattcttagctcttttttggggtggttggtatactaagtactagtcacatacctctgccttgcccagaatctcacatcccgtctcatctgatagggacttgatccggaataggggggtgtttccgatacaaccttcaatgccttccacaatagagggcgggccagctcgggtgccatttttgggggaggttagttctggctcattatcctcatgtctgggacgtgacagttcttgatatgcgagtgccaagcagacaccggtcacgaaggccgtgcctatatacgccgttgaatgatctggcatcttcccatgccgttatgtcttgatagaggttatgtgcataggatatgaagctcggaccgtcaggctttttggtggacgacaggagtcagcttatattccgtacttcgatgaaagaaatattgaaagctaattcaaagagttctttgtattcaaattgcattcagttcgaatattgtaatgtccaaagtctcgaaaattgaaggtgatgggtttcgcctgaggcacgtggctccggtcatccagaagccgttctttccgttccccggaacaaccgtgagcttagctctacagtcacaatggactcgccagtccttacccagctgttccgacagctcttccgtcatccagcatgtcgatctataaggcggtcaccttctgtacttgctcgaccacagtctcgatcatttcttacgcgacgcacccctgtcaacgtgaagcgcaaaccgcacgaagaaatccagctatggacaaagcggggagactaccccaagaacatcgatgaggagtacaggaagtacccgacagttacagcgaaggagctacgcaaccgccgcgaacggccgcggcaggtcaaaatgctgacacgcgagttcatcgacggtgagttcgacagctcggtgaagcgtgactagttctgatatagccgtagacagcctctacaacccacattatggatacttttccaaacacgccaccattttcagccccggagagccattcgacttcaacaacatcgaagacgggcccgcgttccacaaactcctcggccaacggtacaccgagttcgaagacaagcttgatgcaacgaaaccagatatcgcgcggcagctgtggcacacaccgaccgagctcttccgaccatactatggcgagacgattgcgcggtatttggtgtcgaactacaagctgaccctatacccgtaccacgacctgatcatctacgaaatgggcgcgggaaacggcacaatgatgttgaacattttggatttcatccgcgacaccgattacgaggtgtatcagcgcaccaagttcaagatcattgagatctcgcccgcgctggcagatctgcagtacaagaatttgaccgacaagctcactgccaaaggacaccgggacaaggtccagattataaaccggtcaatcttcgactgggacacatacgtccattccccgtgtttcttcctcgccctggaggtgttcgataatttcgcccacgacaccatccgctacaagctcggcacggaaatgccacagcagggtggtgtgctggtcgatgccgacggcgagttccatgaatattacaacaaccagctcgacccagtcgcagctcgtttcctgcgcgtgcgccaagccgccgcccgtcgtcctttcccgagtcccttgggcccaccacttctccgcggactccgctccgccgcgcccttccacaaggaatactccctgccggagtacattcccacccgactgatgcagttcttcgatgtcctgaaccagtacttcccagcccaccgtctcgtctctagtgacttcaattccttgccagatgccgtgcccggggtcaacgcgccggtcgtgcagactcgatatcagcggcagacagtgccggtgtcgactccttttgtatgtggatgtttctaatgtgactttgaatttggctgactttttgcaggtccatcaaggctactttgatatcttcttcccgacggactttaatgtcgtcgaggatatgtaccgtgctattacgggaaagctgacgcaggtcacgagccatgaggagttcgtgcaccgctgggcttacattgaggatacggagacgcggaatggggagaatccgctgctgagctggtataagaatgctagcatgttgatgactgtgtagatatggacgatgtcaatatcattcaaccatgccttgggcttcgattatagcagctccttctctgcgggagtgtaatttgcctcaacagcggtttaaccctcaactcaatgcctcggtggaagtcattgcacatcctcaccataaaggataatcccgatgacgctcggggccatcacacacccagattgtgatatatgggagtctccgttaggctctagatgtcgtggcaaaggccgcccactggagttgtcaccatcaaatgtttctctgccaggtaatcgagagagattttgagacgcttcagaatcgaggcgacaatgaaaatgaatccaggctcaagagacaccaatttccagtttgacaatcccaacccaaaattagaaatatccagctctccgaagtgatagcgctgtacttcccaacaaaccccaaaaacacaagagcaaacaccagcctacctcctaattctgcggaatccgaaagacaccattagcaaggtccgtaagaaccccaaccccaaactccttaagcgcatcaagtatctgctcaacagtagtctgcgccagcccccccttatccctcgagtaaatatcaacgcccgcaggcgtgaagagcgtcttagcaaaatacgtaacaacccactcgttcccatcatcgccatgcccgaagccgagaacctcccagtgcgagctcgcgatcaccagccagcctttgccgcgccagtcccaggcgccgggaacacctggcgtcggggtgtcgatgccatggacggattttattttctcggagtcgatggattggtattggactaggtcgtcgatcttttggactccggttgaggagggggggaggagtgtgtaggttatgttgacgttgcgcttgtttttccatagcgggaggctggagtgggttacgtgccatgttccgattatgaagtcggttggtggggggttcttggttcctgagctggaatatattgatgggaggctgagggagattggagacatgtttttttgggcgcgtgttgagtctatggaggtgtctggggtgagagctctggtggcgtatattggacgatccctacctgaaggggtgttatcgtcgatctatgcaaccctaactcgcgatgaaagagatattgtcgaagtagctgggatcactgagcaagaaaatagcgcaagttaccaagttgaggggcactaaatcagtatttgaactgatgatactgatagatgctacgaaagtatactttcgtttgcttcaaacaaataaatctttacataactcaagagaggatagtaatcaaacattaattcattcaagccggctcagagcaggagagtggcgatacaaaaggatacacatacatatcatttctccctgacacaagcagcatttcacctaaggccaggtaatctcctaagttattctacatgaaggtctgagcaaatgcggtctgaccaaagacaggctgagaaaaagccaaaccaccgaagagtggctgggcaaaggagagcttctcagtaggacgaaaatggggaatattcggttttggtcctttcggaattcgttgaaccctctccatcaatgaggtatctggaggaagaggaggatcctttggttccggtgcgagaatattcgttgtgatgttcacgttgttgattgaaattcgcgagtgcgtagaaatgcctgccttgcgattgagcccactaagggctttatctagctcgtagagaatagcagcgttcagggaggctggtgtgcaacctgctgcagggtttatcacaggcacggtgatgttgaagttctcgagtgttgtgcgtgagccacgataccgtcttcgccagatgtgctcagggacgaatagtcggcagtggcgccaggagtggccgatctctgcacacttcctgcagaacgcggtgcatgccccaatatgatttctatcgcaactgtcgcagcgagagcgataggtctcctggtaggatctctctctgccgtcttgacagaagtgtgggcgcttgtaccgtgggtagtcgtattggtcttcagcttcatcaactctggcacgcttattcgtagtcctgaatatttccttattagcggagaccttggatgagactctagatgcactctacacacgtatattccattttgacgcgcgtggagagagaaacagaaaaacaaaacaaaagaggagaaggtcgggggttttgtttacttgaacgaacgaggaaggaacgactctgtcacatgctgaaggcaaggcaggctctgattcttcgtgggaaagagcgagtgacgagactgatatgaaagaactcatcgggcaactgcggtcccagtctataatgtctgcaatataatgagcaaactcttctataagtgatactctcagcttatttatctgactatcaagaatcaagaaacttctatgtctaaagttgaattgcaagtgtgagaggcttaattcatttaactatggcatgtttggatcattggatttttcatagaggaacaaaccccccggcatcaattgcgctgcgctataatctccgattgtcctgacacacaagcatcaatgaacttttgtggaagcaacccgagtcgtggatccttccctgcaactgacagtagccttgctgctacatctaggtatgaagagctgaacgtaatccagagagacatttcgggctcagaatcttccgatgggcgggggtaatatggatcgttctcgaaaaacgcatccacgagatgagctatcaagtcatccggcctttccagtccctttcgttcctcccatatattgcacaaattgaagtcgagaacccatacacaagtggctcggcgttgaagcttgtcacgtctcatgctttctaggtctgagtgaggggccatctccatgatattttctgcgctgagtcccaacgaacgagagacatcctgggtgtatgtctctccttcgctccccagcacaaattcaacatcgtagcaatccacgtttgctgaccagtgcatgatcgctaaagcttggccaatagctctagcataatgctggatgggtagatccagctcgatcatctgatcgaggcacaagttgaagtttctcaatgtgaaattacgtgatggcgggtcattcgtaccacgccgacgaccaagatagatacgaacgagacaatcacggttagtgtcttgagatgccacggccagcttcgaggaagctgggcaataggtatcgatgagagcttgtcgagcaagcttaggcagtggaagtattcgttctgtgatcaatgccattgccggtagagggaaagagaggtgtgatccaaacaggttgatatgggagtcccaccacttatcgtttgtctttgggacgtatgaaaaaatgttgggaacccgtacttcgacggactggtttgtgaacgcctggtataccgcgagatgggcttggaaatctgtccaaagggcattttcgaatgatggacgggcgatttttatcgcataggcatgcccaggccgctcgaagataattccacattggccaaagccgatgctgcgataaccaatagaggctgtgtgctgttcggtgttgggtaatgcggatggggacgtagaaatgacggaactcgataaaacccggcttaagacttcacgcggctcggtggaaagaagatgcaacgctgaagcaagctcttcatttcgtgcagcatcaagtaaggcggataagctgttggtaagctcgatgctcacttgattgtgtcgatccatgtcagagagaagtgaagttgaatgctgaaatgacgggaccggtagattatctttgaggtctttttgatggtctttttaagagtcctttaggagtcctttaggagtccttttagataggtcgagtctgaatatgatcaacttcaagcacagggtgtggtgagaaggagacaatgtgtaaaacggggtgagctaggcagccagctaaactacggcttatgtacaaaagatatagttcaagtcaggtcaatagaaactatttactttgatctgttcgggatatccaatatctatttagtgaaatggcaagggtgaccaagctgagtatggccgtgtatatgtagaagccagactgttttcgtgtattttctacaaacaaacagagacttatatagatgaagcctatcaaacaggacaaatatggcaggccattcacctactcattctctcttcctctccctcttcctcttcctcctcaccttgtctttctgtgcctagctctaaagaaacgagatctttcttccttctggttgcaaaatagctgtatattgccctacgaatgagtgcaacttcaaataacccatacgtgggctgataacccaaaggagttgcataatcaactcaaaagaccgttattatatgattagcattggaaataacaacgactacagtattggaaattctattaaactccaagaaactgtggctagatgttcaaattgacaaggcgcacttgtccccgccacacgggcagacaaactatagggcattttcaaaggaagcaatgcgttcatgaaacatatatatgaggaaatgctttttcctccatggcttggagatcccatcccagcagccatcaatgataaaaagtagatacaatgcagccaggccttgtcagccagaataaaaacatatcccataccttcatatacgcaacgaccatatcacaatcaacaatagcctagaattcaaactccttgcggaagatgttaacgtccatgccggcgacaacctggtcagccaagtcacggcggcccatctgactgaacacacgacgcagagtgtcgtatagattcgtgctctgattctggctgatgtgcaacatgcgctcgaggcgctcgtcgtccaggccatctggatgcacaccgtcgctgatgatctcacgtgctcgctcacggccctcctgctccacaacgcggtgcatggatagtgcgcctagcaggtgctgtgcggcttctgggtagcagccgatgttgatgcaggatacgcctaggttgtagcgggcgcgcacaaaattgggattaatgttgagggcttgctcgtaggcttcgatggcttcttccgagcgcccggagttggcgagggtcgcgccgagtcggttccagaggaggtggagctgctcttgttggttggtgctgccggactcggtggaggctagggcggcggagaaacagtcgacggccttctcgtattcctcggcgcagtagaacagaacgcccagtccgacttgtacgtcggggtccatctgggctcctgagggggagagctgggccgcttggatgaatagttctgttacgcggtcgtggaggagttgacggtctgtgaagccgaggtctgaatcgccggatacttccttcgggtcgatgattgtggggtacttgtgggacagccaacgctcgagtgtgcggtaggcggttgagtcgtaaccctcatttgtatacgagacagccaagcccatcaaggcatctaaattcccggggtcgacctttagggcttgttccaatgcacgaatagcgggcaactccttttcgttctgcgcctgcgcagagcccagcatcgtccacgcttgcacgtgctgtggatccttctgaaccgctgcctcaaaagccagcgctgccagcgacagattaccgccgtcacgcataattttcattccctcctcgaacggattgccgacagcctggtagacattatcctcctcgaacatatagtcgccgagctggggatctcggaaacgagagttgagactatcaaagccatcccagtcaccgaggtcaccaacatgcacgttatcggtgacttcaaagttatcttcctcggcaagttttctgctcgtggtctcagcctggacccgttgccatacagactcaaaaacgtcattgaagggcactgacctgtccaaatcattcagttccgcctccatcgccgcattagcctcttcgtccgtccgggtctcatttccaaccgtcgcagtctccatttcagcaaactgtgcctcccagttttcatcgtcgagctccaccatccgccccttccccttatcctgtgtctgcccctccataggcccctgttgcatgcccatctgcccacccatcataggctgcatcatccccataccgcccatacccataccacccatataaccaccgcccatcgccatcggccgctgataccccgccatcataggcgatgcgttcgcggcagcaggactggaggtctgcggcatgcccatacggctctgctgttggaatcgtgcaaactcggcaggactaaaccccgatccgttcttcatctggcccgggaacgcggcttccatgcgcgcttgctcgcccgagtcaaactcccctgcccatcctggcgaccctgtgcgggccgggcctgtttggaacttatccagctcgcggcgcatgtgctccattgcgaacggctgcggtgagggtccgtttagttgttgtcctggttgttgcatgaaatcgtccatcatctgataaggaggttcccaactccgagattaattttccgttgctgattcctttgcgaggggctgtgtggctcacctgatcctgtccgcccatcatactatgtgagcgcatgccttcttgcatgcctggtccccggcctaccagtcggtcgcgctgtagtgatttatcatcctggacgtgcttcgtgaattgtgagagcgggttccccgcagtagagcactctgggccaccgaggaacgacatggtgggtatgtggcggtttaagacgaggtagtattaatggaaattaggaagagaagcgaggacaatgtaaaggtcgaggtgcattcccccggatatcgttcgacgtggggctcaagggctttccgcctcgtcagccgaggttccccgacggcagtttgagagtcacgagatacacgaggtaccaggtacatacaacagttgcatatgaaaatttgcagaatataccaggatgcgactttgggcttattcgataccattcatcgttgtcgacagaggttaactggtgcgccaaggcgtcagatatgcaagtttgcagatacagctctcgtctccggatctttgccacctgtcacttgtcctaattattgaacatcatggtgttttcaaacgataagatctaatttgcaagttatatacacacgaatccatcacatagtaaaacccgaagaaaaggctagctagggcgtcgtaattgatgcctttggccgtaggatccaaaatacagcccttatagatccctaagcctgaacaacagtattcaaaccgaccagaatattgtacgaagtatattactataggtgatattaaggctttgcggaaagatttagtactaaaaactagatcctagatctatacattgaagagggcagcagaggcaccgacagccctgcctgcgatacaggtgagagcaaagtcgtcactgggagtagtaggacgccagagaggagaataccattggatgactactaagaagagaagaaggtggaaggtgtctgcgttgcggtctctgtctcagggacgataccatgtacccttggtatggtctacctagtaaaaggtacattttcccgaacctctgtaattctgtaagaagggtaaggatgttgaattcagtgtagattcatcccttacatagtaggcttagaagtagacagagggcatttacctagaaattatgcaaaattctaggcagcacttggaattttcacgctaagataggaaccctcagttccctgaggttcttcccgctgacatccatccttcaacactgaccatatcgagcggcacacaatcagacaaccccggcgagaccatacgtctggccgtggagcgatttcgcatcaaaatggagtccgcggatcggcaattcattcaagaccgcgtcgatgagatcgaaactatgcatctctcgaccgatgaaaagaaactgagtcatatgcgtcgctactagtacgacttaggaacgacaagctcaagtgagagctggaatggtaacgctccccttggccctgttcggcaacatcgcgaggaggcaaaggtctcgcggctagaggacctgaagaccacatttcatcagtatatggatgggatcgttccatcaactatggcgccagatgaatggcgcgaaatgtttatgaagactttcgaaagcgtgtctaatgaggctcctcggcatgatgacaacgatgatgaggacttttatattctgagaagtgatgaactggctcacttcatcaaatatgccaatggtgtgcacgatccggactctcgtcactcgggcatctctccgtgggagcccgtgcctccaatgagaatggaaattcgcgagtatgcatatacggatcgtccggctgttcaagcactaactcctcctgacatcgcgaaagcacgagaagaattgaaggagtctcttgaagacaggctgctagacgaaaactggatttggggccattgcggctacgaattcgaggtaaaggtcggtttccatactggcctcggctcgtgtatagaacacgatgcatggtatagcatctatatgtattgtcgtcaatttgaagaagactctgatccaagtcacaagtactggacatggcgggttgtcatttttagcgctgatattatgaatccaaccgagccgatatatattctagatgtccaaaacaagatgataatctagctattgccataagctcttctaatagtttcatgtcgacaaagacataaagatcttctcctctggaaaccaggagaagcatcttctgcaagatgagcaaatagagagagtgccaaactgagcctctgcaggtcagataaagaagctgccaacacaacataaagcctacaagaggcgcaaggatactgccaaagagatttctagttcctgcccagctggcggtgatgtgttgtgccgagttcagcgaatgtctcatcagtcgaagttgatcgtcggctggagaccaggcaatcaaaagatgctctcgtgaactgcgacagcaatcgtcaagtgtattccatgggatttgatatgacacttagttacggcaatagtacgtgtagatatgatcattctacggagtacttaataaatatcgcgagttaagaatgcttccgatttccattttgggacactattgtacatttgtataattcacatataaccctctctattgcttcttctcggtctcggtctgctcagttacctgctcagttacctgctcagtcacctgttcagttacctgctcggttaccggctcagtctccttgatctcagtaacttccgcaacctccttcactccgcgcactttccgatctctcatacccgagaccgactcgatattagtctgagcatccgagtgttgcttgagggagttcttcttattctgctgcctcttctcctggttacgcttgtgctcctcaggactcaagaccttgcgcttagcaaagctgacagtcagcttgcggccgtaaggcgccttgcgggagagaacctccttagcgtgagaagcgctggcctgatcggcaaagtcgatgtgtccaaatccacggggcaagccagtgcgacggtcgatggggatacggacatcagtgacaccggggatatcgtcgaacatatcctgcagatcctggtcggtcaattcgtagggaacgttgccgatgtagagggtcctagtgggcttggtttcggccatggatctgtacgtcgtgttggagaattgcaccaccacctcgcgaccttccaggatgcctccgtgctgctgcgtgattgcttgcgtggcttcctcgatggtgctgaaggtaacgtagccgaatctgtaagggagaatgggtcagtctctagtaggctttcggttgcatcggtcttgggaactcaccctttgctcagcccgcggacatcgtgcacgatcagtgcattctctacggcgccgaatttctcgaaatgcttgcgcaagtcctccgcggtcacgtcgaagaagaggttgccgacgtacacggtggtcttcggtacagggccctcgctcaaatactcacgtcggcgttcttctttgggcacacggacttggccgggcgtggatggctccggtttgacagtcgagatatacctaatcggaatccgtgaacggccttcatcggtcgagtttaaccgtgtctgtgtgagggttgggtaggcgaaccgagcggcgagaatcggagtggagcatgttgaacgcaacactgcactgctgattgatgagcgtgaagcagctggggacaattgaagccgagaaacggcccggcggaagcaatgcctagaaattagttgttttagcaattgtcctcaatgttgcatgcaccagcgagtacataatgtatacattctcggactcggactctgtactctgtatagctcacattttgaattaaaataacacaagatgcgttgatcttgtattagagataatatgatgacaagagaagaattgcgcgaagccagataactttttttcccggaagataacacccggcacgtgactgatatagccaatgataaggaggtagatcaaagcaatggaaagcagtggattggagattttatatagacaaaactcagggtttaggtgataaaacacgaagtaaacgtgagatttgataactcaagagtggaaatatggcagtagcctcatagtatgatacattgtccaaccctaacaccgacagaatccataaacgcaacatattttcttagatcggctgaatctcgccagcacgcatacatatccatgggaaagaagaagtagaaattgcttcgttacttcaagtcatccgatcaagaaacaaaacatttccaggtatcacaaatggccaacattttctggcaaaaaggggagagaaaaaatcatgtagaataccaatacaactcgttcattgggaaccttggccccgactatcgttttgttgaggcatgggcgccatgccgtaccctgttactggcacacctccactatcgggactgttggaggatactgagtataacgtaggccgaggaataccactaactgatggtacccgccctgaggctagaggactagacactgaaggctgtgacatgcctccagactgtggggttgcttggcgctgtgcatcaatcataggccagaattgatttgttgtgtcgagggttgggttttgaatgtatgtgtcccaagcatcctgatatcaacatgtcaacattgaacaccgggtcccgaaaaggaaaagacttacccaatccaggttaacttgcgtgtccggcatttgcccgaacatgctactaaagggcgaaagtacacccggcatttcggccgaagcgcccacgccacctattcctgttcccattggtgtatctcccatcttgaacatagggtcagcaaagggcggagggcccgggttcatcgggctcattccgctgctcaacaggccgagggtcatggccgcgttctgcttctcgtcttgtggctcaaatgaagctccggcgctattttcaaggcctgggaccgacatgtgcagcttgctgagcatcacaccgagaaggctagacgccttccatgcttccatgctctcatcacgcgactcatcccaaatatctttcgagagttggatcgccgcggtcatttcatcccgccgctctcggccccatgtgtatgtgtctcccgatggccggccggtcacctgcaatgatacgccgtggtataggtcgagactgacaatggtggctgccagtaagaagtcggctgaactgagagaacttattcggctctgacgaccacggaggcgcccgctgtgagtttccgcgtgcaggagcgcctggacttgcaataactccattgctgagtcgatacatgtccttcgagaataggtgaaacgaggattttctcgggcgcgaaccagatatgggcgatgaagcacacactgagccttgttgtatacggccattacctgcacaaacgattagtgttgatgcgaattgtggccgctgtcagacaacttacgaaaaatcgcgacatgataacattgataggatccaactggcactcctccataggccgaatatgcaagtgctcggggatcatgtcccttgcctgtcggagttccgcgtcgacttccatcaccttttcgtatggggccgccgatacagcagagctttgttcaaccacacgtccgaatgcatatgacaggcgcgccttagcaatcatatatgagattggggttggctcattcaattgacgtggtggcgggagctccttgcagtcttcatcgaaatcatcatcgtacaaattccgtggtagctcagtatcgctatctgtactccggatcatccccggcaacccgacctggtatgaaaacagaaggtcggcttggcgcacaaaggtccagactcgccgtcgcatctcaccctggaaaggtgtgatatttgggaacattttggagtcacggtgatatcctgatcgcattgctaggcgaacaacaacgccggtcatgacccagatcgaaatatccgcctctcgggtctgggagaaatcgccatgcagatgaaacacgagcgcttcaatcaagaacgggtggggtttcgtgtagtcagccaatgtcaagcactgtgctacagaattccggaatcccccagccatgtccatggacttgccccggaattcaggtggctcatcgccttcgcggtggtaagacagcattgccagcctcatcattgcaaagagcatggcaatccagactagttcggtcgcggcaggatcatcccaatgtttattatactagcagagtcagattctggactcaatgcaattattctcgaggagcttacctgtgcttggaatgtgggtccatggagaacatctaggtaaagtcaggatcaagaccacaagctacggagatagcaaatactcacgggttgcagggtcatagcagttgaaatagcgagcaataagaatgtcagttgtatacttagacggcaagccagtcatgatctcgctacggctcatcggcttattgataccaaacaacaaagtcgagcctgatgaatcagtagatggtcgggccgccttgactttttcaaattgctcatcaagttgcttcttgtgcgttgtgaagaaacttcgcacctcggagatctattcgatgagttagaaagactcgagtttggtcaaacctcccagacttacatcgtttaatacagacgcccaatgagcatcactgatgtaataggacttgttattatccatcttcataataccaaacgacttcgtcacctggtccgtgtcgctctcttcggcgccctcctcttcgatatcgagatcatgggagaaccgagtcgagcccacactattttccccggagatcgccgccatggcagcagatggacccgcagactgagagccatttgtcatcaacgaaagaaccaagccttctaaccgatcgatgcggttttgcatatcatccggtgtagtggatgactgctgggacgagttcttcttgcgcgagttgggttgcgcgtagttacatgaagcagcatctcctcgtttgacacagttttcgcaaggattcgtacgattgcatttcagcctagaaccgttagtaaaataaaatagaaggtgtttcagccatgtcttgaatacttactttctgtgtcgacaaggcccacatgacaaaggtactcggtttcgtttccggacaactctgtaatctggagagtggccagcactcgacgaatttgtagaagggggtgttggggtcattttgaatggcatgatcatgtatgggtaaccgacttgttgtaatatcgacggtaatccgcggatgatgcagtgcacgttgagtcaacgttccagctgggcggggctctcaagcacgctgtggcagtccgcacagctctaggatcgaatcaaatatgctactcggttgttctgctagctcatccgaacaactttctcagtctgattgcaagcccacttctgaatatctgcgcggggttccaaacgcgattttgcttccttccctagtcgtagcaaggtatgtacagttgggcgcaacttcaatgccagatttggctcgtgttctaggcaaccgtgccagacccagaacttgagatgtggttgatgttgtacgcgactatttcgggcggtcaggggttaactaagccgcacagtatcactagacagatagcggggcaatgcgacgaacggatgtgcgttgtcgaagcttgcgatgtgcgatggccgaaggagggggtgttcggtgccgcgtggataagtgtggtcgggaggccaagtacagattcgaaagactatagagatattttgattcaagtgcgatcaaggattcttctcgagtcaacgatagcaacaaagaggtgatcataaggaaataaagctaggtagacacctgtggacgaggccccaacgaaatgatgattaatccgttatctccgggcgatttttcttatcaccagatgatctcacctcctgcaagtacatagagaggacggagtatccgcactccgtatatattgtgaaatagtctattatcttcgattcgatacatgaataccttcttccctcttgtgaaagctgatccagtcgatactttacccctatatcatattcattccttctctattttcctagacttgatgccgattggctagcaatcgacgatcagtgactcataggtagaattcaaccagacatgcatgtctcgaattctaccttgtgagtgggatctagactgatgtctagtttggaagttcgactcacactatgtagactgacttcgccattatggtacttgttcgtatattccgagtttaagcttaaaaagaggtgttagtttagtttatttaggtttacggatacgcctcgttttatcgctgtgtattctttaggtaactagtgcatgtacaactctgattaagtaaccctgaattatgtcaaatacacatttctcgtgcacaattcacatactttgtatagacaaactcggtgtcgtttccctccgcaaccatatagtatgcatccaggaagatgtcggtattatatacatccctttttcatcctttatgtctaaaggaacaggtgggttggaaaacgaaccattatcttgatcgatcgtatctgctcccatggacatcttactagctttcttccactttcagagacttggtgagctttcaaattgttgagcttggacatttggctttgttgtatggagcctatggatattaataacttcggggcttgtttagcaaatgactagaaaggcccacttctatattctttggtagggcaaggtggtcgagtctggtgacttataggacttatgtataagagcttaggctaactatggtttgactctatatttttagtatcgagagacaagtttaaccttgttacgctgcgaagggtcctcggttgttgaacgtcgtctcaggtgccgacgcacgggctacactcaaagaaggggtatactaggcatgcactaatatggggaatagcctgggtacggtctaacggacccatattgcggggtttaacgaatgattagcttgcactttgtatagggtactgcttgttggtcgagatacctctcattcctaccaaccaccatcgttcatcggatcctaacatgcacaactgccgatcgcagcgtctttatgtacgccaaaagcattttcaaatgctgacttcttttctttctagcggggaagattacgtatatcgtgggatgtgatcctgtatataacgtgcctcctcgtggcttctattttgaactatgtaggtctaagcaatcggacacaactatggctatcattacagcggttttccctgatgctgcatttcactatattttctatgcagttcctcttctactcctactttaccttgcccataattatttctacaattcgctaaacctctttcctggccctttctgggcgcacctgactgatatttggcggtatatcgatgtgaagggtcgacgccctgagcttacgcatatagccttgcatcgcaagtatggcgatatcgtgcgccttgggccacgcactttgtctttcgcagatccaaaggcagcgaaggtgatctacggtctaaacaaaggattcaccaaggtagagcagtgtcatgccgagcccagaaacatctacagcttctaatcaagagaacagtccgagttttacccagtacaaatgactgtttctaaaggcgagccattgccatcgctgttctctactctagatgagagcttccatgcgaatctccgccggtctgtcaatcatgcgttctcaatgagctctttagtacagtatgagccaatggtcgatgagactacgaaaattttcctcgaccaaacggaccgcctctttgctgatggagccacagtgtgcgatttcgcacgatggctgcaattcttcgcctttgacgttattggaagcattacatatagcaaacggcacgggttcattgagaaaaacgaagacatcgatggcatcatcaattccctggcaaatatcttcgattacgctgcccctgttggtcagatgccgtggctagataagctattttggaagaatccgatatttgacttccttcaaaaattgggcttatcagataattcacaccctgtggccatcttcgcaaagcaccgcatggaagaacgtctgtcagcaaaggctggcttagcagacccgggatcaaaggatgatcttctcaccatgttcctcaaggcgggtgaccttcgtccagatttcatgacgaacaaacggatccttacaatggctgtctctatggcctttgctgggtctgaaacaaccgccatcagcattgcagctgtgttctattatctacttaagaacccggagtgcatgagacgggttagacaagagctggacgacgctgttgagaacggtatcatcgtgaaccgcccaacaggacttgtctcatggacagagtcgcggcagctgccctatctcgatgcctgcataaaggaagctttccgtatgcaccctgctgcgggacttcctttggagcgtgttgttcctgcgtcgggggtagagatctccgggcatttcatccgcggtggaacaatcgttggctgcagcgcctgggttattcatcgccggacagatatctttggtccagattgcgacatatacaaccctgatcgatggcttactactccaccggatcaattgaaggttatggatggaatgatgctccagtttggtgccggttcaaggacctgcattgggaagaatatctctctaatggagatttataagattgtacccagctttttgcggagatttgaggtatgttctttttcctaggcggagaccagtgatgctgagttcttgataggtacagctagcacaccctgaccaagaatggaaactgtggaatgcatggtttgtacgtcaacacaacttcaagacgatctttactccgaaagagattatagtatgatttgccgtcatcgtttagctcaagtattgaaacttgggagttgctatactttgtagaaagacatttctcatgaagttcaacaacagagatcttctttctagacaattgtcaggtttaaaaaagaagtaagcttttatgaaatgctgacgtgatacttctttcgggatatataattttgtttctgactagctttgcagacggcgcctatcaattagttaaagatgcggcggtgcctttcttgtatcgtaaccctaaatagagtaatatgctcctgatataacaacaggtttgtcactagttattatcctatagattcaatatcagggatccaagaataaagagcaaagaaaatccccgcccaataccaaccacaccatctgcgcatatttaggctgcaacatgcaactgacctatccaggcccgcctttccctttagggcaaggcgcagctgaactgggctgaaatcattggatatgccgaatcctcgaattcgtaatgtctttacctagcccatatacaacatactacttgaacccatgtacacgcagagctacagcagccaatggaagtatacatctactaactgaaacacagactagaagtacaccgctatatccctatgtctaccggttaaccgtatagactacggatagtcacagtagtagatatatgtgctttttttctttttctaagcagtagaagagctgttaagagtcacaataactatctactatattagcaatcctgtatatacatactaagcccatgatagtagagaatcgtgaggtgaggaagtgtcaaagtgtcatagccacaccattctacagctgcctctgggtacttgcatcgatgtatccaattgtcacctatcttcacactatacccctgctacttggggccagcgcagcaaacaaagaacttgtacaaacgataagtgcgtccactccaaatacttaataagccgtcaatccccattcccgccaatccgcaccgtccttcctttttattttgacgtcctcaaacccgtaaagtcatcttcatccaagtttatcttattatgagtgacaatcggggtcgtggacgtggtgatcgtgggggtgaccgtggccgtggccgtggtgatcgaggtcgcggttccgatcgaggccgtggtcgcggggacagtcgtggtgatttagccctccgcccagccggtagaggcgatggaaatcgtggagatttccgaggccgaggcggtgatagaggtcgtggaggcgatcgtggcagaggtgacttccgtggccgtggtgattttcgtggtaggggtgatttccgcggtggccgtggtggaggagggcgtgggggtgctacaaactttggcccgcctatcttcaggtttgccttcctcactcttcgctgctcatcaaacaaatctaatcctttggctatagacagggcgaaccaatcccaccacctaaccccaccgtcaccaagaccgagaacgaccttgccaaagctctggttgtgagtggccagaagaccgtcagacaggcgaaatatcccgaacgtcctggttacggcacagctggcaggcctgtgactttatatgcgaactacctgccgttaagcctgcctaacaagcagcttttccgctaccatctttccattgcagccgactctgcaggccgatctgcccctgtgggcaagaaggcccaacacatcgtgcgtctgctgttggaggagcacttcccacagcaaaagaacagcattgcctcggacttccgctctaccctagtctcgtgcgtcaaattgaccgagggtaaattcgatgtgcgatacaaggaacacctggatgatgactacatcgatcctccccgggtgcaccaggttacttgccagtacactggtgaggtcaatcctgccgacttggtcaactacctgacctccaccaatgctggtgccatgctagaatccaagtcggagattgtagctgccctcaacatgatcatggggaaccaccccaagacggacgatcaggtcgtctctgtcggagccaacagacactacagtctgcgtcaggataccatggaatcgttcaaccttggaggtggcctatccgtcctgcgcggattctttgtcagtgtgcgtgccgcaactgctcgtgtgctcttgaacgtccaggtcaaatatctggcatgttacaataaaggacctctggtcaatgtgatccaagactacggcaatagaaactcttaccgcttggaaaagttcctcaagagcctccgcgttcgcatcactcatatttcccgcaagaacagccgcggtcagccccggcctcgcatcagacctgtctatggcctggctaaccgcggtgatggtggctcggcgcccaacccacccaaggttccccgccacggtgctggtccccaggatgtgcaattcttcctagccgaatccagccctcagcccgtcgccgtgcctggtgcgcctgagcccaagggaaagaagggaaagaaagctcccagggccggtcctgcggaagccggtcgctacattaccgttgcggacttcttcaaaaagggtccgtcgatattttttcctttaattttccttcggctcccttcctcctcgtgttgtgctgactttcctcttagagtataacatgactttgaatgcgaaccttccagtggtgaatgtcgggtctcgtgagagacctgtgtatcttcccgttgaggtctgcgaagtcgagcctggtcagccagctaagtccaagctttctggtgatcagacagccagtatgctccgcttcgccgttatgggccgaaagccgggtcagaacgctcagtcgattgtcaccaagggtgtgggtgtgctgggactaggcgagccattgaatcccacactggtaaacattccctcgctcccaaaatcttgtcaagctttctaactttccatttacagtctgctttcggtattaactcttccacccaactgatcacggttcctgggcgcgttctctccgccccaaatgtctactacaaagacggaaacaggaccaaggagatcaggactcaatatggcagctggaacatgcgccaaatccagttctccaaggctgcatccatgaaatcttggacttacctctacgttgatcaggagggctcccggccagttttccaaaacccagctcagctcaacgcgtctctggaaggcttcagaaagacactcagggatatgggaatggctgtggacccccacaagcttggcaaacgtgttgtcctgaccggcaagaacgacgctcacgatattcagcaagccgtcgtcgatctgcagaaacagcacaaccccatcttcattctgggtatactctacactaaagacactggtgtctacaactgtgtcaagcaagtctgcgacgtccgctgcggaattcgcaacgtgaacgttctcgcagagaagctcatcaactccaacgaccagtacaatgccaatgtgggcctgaaaatcaacctcaaactaggcggtgccaaccaggctcttcgcacccaggatctcggcataatctccgaaggcaaaacaatgctcgtcggcatcgatgtcacccacccttcgccgggctccgccagcacagcccccagtgtcgccggcatcgtcgcctccgtcgacgcaaccctcgcccagtggcctgccgagatccgtgtccaaggcgcccgccaggaaatggtcgccgacctcgaaaccctgctcgcctcgcgtctcctgcactggcgcaaactgaacagatccctcccagagaacatcatcgtctaccgcgacggcgtctcagaaggccagtacaacaaagtcatcgaggaggaactccccctcctccaggaagcatgcaagaagacgtacccagcagaccagaccaagaaaggcctcccacgcctggccatcgtcgtcgtcggaaagcgccacaacacccggttctacccaacaaccgagcaagactcgaaccgcgagaaccccatccccggaaccgtcgtcgaccgcggcgtctccgaggcccgcgactgggacttcttcctgcaggcgcactccgccctccagggcacagcccgtccagcccactacttcaccgtctgggatgagatcttctacccccgccacccagctaacagcaccgggcccggcgcagctgatgtcctccaggacctcactcacaagatgtgctacctgttcggccgtgccacgaaggcggttagcgtctgcccgccggcgtactatgccgatctggtgtgcacccgtgcccgctgcttcttgagtgacctgttcgaccctatgcccgttgatgcttccggtggtagcaccagtggcacggacggcgcgttggaaatgactcgcacgcgggatgtcgtgatccaccctaacattgcagagactatgttctacatctagtctgcttttgagaatctgcgttccgtcatctatctgctatctactatgcgttttgcgtatcttttgaattctgcttgactcgacttggataaatttggtggtggagagaattggaaatggaattgaaataatttgatggaggaatgaattatggatatcatttggacctggaagacctacttacattcgctcgctcatcgttggtctttggaaaataccgtttgggatattctgtctcgcttggcttcgatactggacactggagactgtttcttatcttagacagtaccttagctgtgagactcaattaaatcttgaacgatgacatcttttgtgatccctgggtaggtgtattatattgttctacgctattgaaagtaggaccaaggaatcggaagtataacaccataaattaagagattaacgaatcccgctctcatggaaataaacttgtacactaataacattttgagggcaaggtacagaaataaacaagaaggcaaaaggttgaatagtacacgcaggccaggcattccacactcgactccaactaacattgaatttccaagcgcgaaataaaaggaaagccttcagcctcgattgtcttttttttgtgattttgcagtttcgcggacaaatgtccaaaattaatgcgggtatcgatacatattgttcagaaaaagtcggccgttgctcgtcagaagacgccgctgacaaggatacacacgtagtatcgagctaagccctagaccagcgactagctcacttagttgttgtctccgtggttccagctgggctggttgtggccgagggggttgcgctgcgcagtggcattcctcctaaccggctcgggggatgcgtcgtcaaagttaccccagtgtggctccatcatcttattgtgcttgtcgtggttttgggtaggcttaggaggggtcggctcgtcgtagttatcccaatgggactccatcatcttgttgtgcgcgtgatgctgctgggtaggatgagggggggacggttcgtcatagttaccccagtgggactccatcgccttgttgtgcttgtcgtggttttgggtaggcttaggaggggtctgctcgtcgtagttatcccagtgggactccatcatcttattgtgcgcatcatgtctttgggtaggcttgttctccttgacgggcgattcgtccgtcaggtcgaattgcgaagcgaagttcttcttgcggttggcgacgtttccgcctgttggaaggggctcgtccttctgctcgcgctcggagagctggggctggccgttgtcgtcaaagaggcggttctcgtagaggcgcttgccgcgacccccgaatgagctgatgatccgcccctcgtccgcggattctgaatcggtcatgtcaaagtggcgatctgcgtcgcgacggggcttggccacgtcctgcttggtttggggggatccggcgccttcttcgtcatcgccaaagccaaagtggcgcacttcttgcccgcgtaggacgcgctggcccttcacaggggtctcaacgtcgttgaagtcccagtgggtttcgtgtttggtgttggcctgcctcacttctgctttggcctcgcgctccgagttgtctccgccgatctcgaagtggtcgtactttccggggacggctttgtagtaatggcggtgttcatcgacaggtccggtgcgcgagtcgggcacgtgatcatccttcacgaaaatatcgctgaagttgcgctcggcaggtcgcccagccgagggcgcaaagggagccacaggggcgcgaaccttcttggtaggggacagaagctcagtcaaagaacccgctccgtaggggtctggggtatatttcttggctgtggatggtctgctgggggtcttcgcgccgctttcgggctcagcgacctccttgactggcgagatgagctcggtcagggagtcggctgcgtaggggtccttgatgcggcgcttgccagaggatgaggggcggtgggggagatcggtatccaacttctgggaagaaggctgcgagggggtcccacgcgccgtctcggcgtctctgaggagacggagttggtcttttccatcacgaatgggccactggcgtccgcgcgctccaataacctcgatttgcttcagcaatgaggcctgatcccagtaaattcggatctgcttgatctgttgattggtgtcgaagtggacgatgtgaatctgcgggatgatgcattagctttgataagcgacgcgcgtcggggaatttaccgtgggaaaggtcgcgacacggtcggccaggaaattatcgtcgagtgaggggagataaaccccaccaccctcggtgaattcgagggttgtctccatgtcgagacatagcgagtctgatccttcaatggcgctgatgaccttgttcgatttcgtcttgaccaccttcgcgttcttcaatacatgagtgatcacgttgtcggacttctcgaacttcgtcgtggtaggaacatagatcaaggacacatcgtcggccaacttagcagccttggggttatccaggaaccgctggtattcggtcttgaagtaggacattgtcaaccgtatagggacagggggtttgaaagggggaagatattccagagaagatagctactctaggatactccagaagtaagctagacgatattgaagttacaaagaaactattttccaattgagaaggggaaagagagaaggggagaagggaaaggaagcgatgtcctacgatgcccaagcgcgggagtcccaacgtacattactcggcataaataatatacaggggaaacgccagaaccagttagtcatcggtaccttgcatatttagttaatgcagatataaaatgaagtgaaaatgcagtagaaaacacgctgaagtccctgaaatcttctggaaccgtctgaaaacacgccagtgtttcaccatacgggctaggcttggggcttggcctcgcgtctctccggtaactggagaatctggagaatacactttaaaggcttcaacctctacagggggatggattgcacaggggacatgcagcataatgtacattgtacatttcagaagtactggattgaaatgcccctccagtgggtgacacgatctctggcgagtcgggagtcatttcaacagtctgcaatgccgattattcaaatcagacactctcgagtagaagacatgattggtctttcattgaagtatagccaaagtcgaagtatggcatatgtaccgagtagggacttgtcaaactccagctcctgaccggccaattcatttttttcctgtaaggcagtaaagccctcctaagcacttgtcgtatctttgaggaacgatagatagcatggtaaattatcgtatgggcgaaaaaggtgggtatgtgttgcaatcgtgtctcattacaaaggtctgttgacggaaaccgcgttagaaaagatcccatgtactgggcgtggtcgaaggacttacccaagataatcctccttgatggtgccaatggcattgatagcagccacgtcgggcttgacaccgaggatcttcaaccgcaaactggttcctttctcaatcacttgatcggcatgatcagtgtattgcggcggcacggtgttaggctcccatttgatatcggagggaatgttctgattggttgtcagcagcgaaactcagagatccatggtcagatgaaacaaaacatacctttcgcgcaatgaagacagacaatgggcccgccagggtgaagatacccgtgggcttaacggaggtaacaatggcatcgacctaagctcagtcagcgggaagccaaaggccaaaaccttgtattccaagcgcataccgtctcgccacggaacggcttccagatgatcgcacgatatctgattgtgtattccgcctgtccgattccaggcatcacccgcccctcgccaatatcaaccatgtccatcacacagatcacaaagtgatcacctgtgcaccgtccctcttcctcttcgttgagtcggccgatgaggtactctcgcatgttgggtccgaaataggacgggtgcatagaaatcaccttggtctcttctttgaggaagaacatcgtcgcggttatggttgaatgaaaatgcgctaatgaattgcggagtggaaatattcaagtcgctttcgggacagtgatgctgtcaatcgaggtcgagggacggcgttttcgaccacgcgcgcatgacctgcaacggtaaagcacaaacaagatgtgggatgtggctgctagaaatgagcgaaatgagatccgagtacccgtgggagtggcagagattgtatctgccttggaacttgaacgaggaggcagatacgttgctgcaggcgcaagctttcctttcgtcaagagcatctcgtgggccaggtttgggtgggtggagtcacgtggtacgattcttgaacggtgagaagttgacttgagatttgcacattcaaaaatactgcaacttcaatttttttccggtatattagttaatggaatacgtagccaatattgcacttgatgatgatttagccatgacctggtggaggattagttcttatgtgaggaatgattggatgatctatagcagaccaaacaacatgtacagaagtaaatagtgaactttcctgacttcgctctcgattcagcttatgatatcatttttacgccgtatatagccttgaccggctagcgttgactagttattggttttcaaaaatcggcttggatgtataccgctagctatatatatcagtctactccaaactgctgtcgtcaatttcaatatttacattacaaccgagcgctaaattgacaatatggaaggcatactagatcttcatcctataaccctagggaccatgtaagaaaatacctaaacttgtaggaaaatagtctaaagcctcactggagtattatatactccgtagttaacgaccaatttaatgagatacgaaagagaatcccaattaaaaccactatgtatataatcaattacctgtccctaggtaatgtaggatctcgtggtgaaactataaatgtagatgatctgataggcttgtgcatggcgggttggtgtataccgttacgatgccaagaccaacgtcttctaagcacatgacgccagggccaggacgaagatcaattgcaccactcaacgctttccgataatgagaatgccacttgcctgatcccatcaccccgcaaaactcttcctctagaattccccatctttttgttcccaaaccggcaagatggcgcttaatcttgagaaacagttactcttcgtaagtatccgcatccaattcccagaacgactagagctgactgtgatttagtatggagcctaccatagcaatcccgtacatccgccctaccctcatctcgaataatatcaacgctcactaacagcgtaggtcaacgtcgcaatccacatcacctgcgtcccaatcctactgtttaccggcatcgtcctcgtacgtgcatctcggcattttacaaccgaacgagatattcccagtgtacaaaagtactaatagtgactttcaaggcctgcaactgcccacccctgttcaccctcccggacattatccgaatcgaatacctgcccgcgaatgccggcacaatcggcgctcttatttacgctactttttatatcctcctagagcccattgccggcggtctactcgcacccgccctgatctcggctgcatactacggaaactacttcctcggcacgtacggaagcaccgtgaactactgggccgggggcatccacgtcgtgtcatggctggcgcagtttgtcggacacggcgtgtttgagaagcgtgcgcctgccttgctggataaccttgttcaggctctcctgcttgcgccgctatttgtctggatggaggttctgttcttcttcggatatcgcccacagctcaaggagcggttcgaaaagggcgtggagctggagattctgaagttccggaagcaggggaagggcaagggcaaggcggagcagtaaatgcgggtgtgggtgcagcacgcagcaaggggaggtattgctcgccaagatcgagggccgtatgttctcgggttgtcgcggttggtgttggaagcttcagtggttccatgggcgcgttgattcatatgtcctgttattagcaagcgatttccggcgcatttttatgcttttgcgagtgtcatctcgcattgtctttggccaatggggatatgttgatccctttcccgtggagtggtcgttgctgttttggggccaatgtgtgattctattgtatggtagtatggcaatgccaagtcagtcgactgacttggaaacaagcaaataatactgcgtactccgtagataacaacatcagcatacaaagtatacaaaccgcccgtcttcggttgccgtgacgaaagccatgacataagcgattcacctgaccaggaattccgccgatccgagaagagaaaaaaacggaaggacacccgtggcacactcttccggtcggcaatgcaaatggaagcaactcattctgggcttgtataatattttgaaaaattgggagaatttgtagaaatcgaaatatagaaaagggaaaaaaatacatataacattgtaggactaagaaaagtcgtaggagatacaccgtggctacactagggccacctcggagggcccagggtccgaaacggtttagcgcgagtcctgagaatccaatcctccccccgacgacaaagctctccctcccgtccacaatccctctctcctctcccgttctcctctccccaattacatctctccctcagagaattcatcctctcatcctctgaaccccctttcacaatgttcagaaacgctctgcggtcgtccagccgctccgttgcggctgtttcggccactggccgcatcgcctcggtgagtctatcccatcccagccgccttcgtccatcgccagttcgacatccttcatctcaatcctgagctcgattgatcctcatacctcctcacacctcgacaataatacatcaacaatagctaggacgcattgtccttctctgggatggtcattaacaggtttttcgtcaattacaggtccgcgcggctgctgccggtcctctcaacggcgttcgctcgtacgcttccgaggccaaggctacccctactgaggtctcctccatccttgagcagcgcatccgtggtgtctctgaggaggctggtctcgctgagactggtcgtgtcctgtcggtcgggtacgtcaattctccctaggcggctgggggcgcgaagaaaaattcggtccccggttacaatgccattgaatccgccattatttctcaacattcgaaaaattaccgatacagaaactaattgaacttcaaacagtgatggtatcgcccgtgtccacggcatgaccaacgtccaggctgaggagctggttgagtacgtgaacccccaaagtcttggcattatgcctattcaaaaaactaacttatcttcaggttcgcctccggcgttaagggtatgtgcatgaacctcgaggctggccaggtcggtgtcgtgcttttcggttccgaccgtctcgtcaaggagggtgagactgtcaagcgtaccggcgagattgtaagcacttcaatccaacccctaggttcattcttatacttggacattgaatctatccacgtatggcaattctctaacacgatccccaggtcgatgtccccgtcggtcccgagcttctcggccgtgtcgtcgatggtctcggtaaccccattgatggcaagggtccccttggcaccaaggagactcgccgtgcccagcttaaggcccccggtattctgccccgtcagtccgtcagccagccagtgcagactggtttgaagtgtgtcgactccatggtgcccattggtcgtggtcagcgtgagttgatcattggtgatcgtcagaccggtaagaccgctgtcgctctcgacaccatgctcaaccagaagcgttggaacaacaagtccggctctaccgaggaggagaagctctactgtatctacgttgccgttggtcagaagcgttcgactgtcgctcagctcgtcaagacccttgaggagcaggatgccatgaagtactcgattatcgtcgctgccaccgcctccgaggccgcccccctgcagtacattgctcccttcactggctgcgccatgggtgagtggttccgtgacaacggccgccacgccgtcatcgtctacgatgatctgtccaagcaggccgttgcctaccgtcagatgtctctgctgctccgtcgtccccccggacgtgaggcctaccccggtgacgttttctacctgcactctcgtctcctcgagcgtgccgccaagatgaacaagactcacggtgctggttccttgactgccctgcccatcattgagacccagggtggtgatgtgtccgcttacattcccaccaacgtcatttccatcactgacggtcagatcttcttggagtccgagctgttctacaagggtatccgtcccgccattaacgtcggtctgtccgtgtcccgtgtcggttccgccgcccaggtcaaggccatgaagcaggtcgccggttccctcaagctgttcttggctcagtaccgtgaggtcgctgccttcgctcagttcggttccgatcttgatgcctccaccaagcagacccttgcccgtggtgagcgtctgactgagctcctcaagcagaagcagtactcccccatgtccgttaccgacatggttcctctcatcttcgccggtgttaacggtctcctcgacaccatccccgtcgacaagatcctcacctgggagtctgacctccttgctcacctcaagagcacccaccccgagatccaggctaccattgagaaggagggccaggtctccaaggagactgaggccaccctcaagaagaccatcgctgccttcaacgccaccttcaacgcataagtgaagaaacaactcggatgatccctcgtggtcggctttgttttcttgactctatgtgtatagacaagatagcctgtacaattttgagcccattgtttttctgttcttcttggtgccggtgcctggcaggagatctcagtctgcccctggatgtagcgatgtaattatctgcatgatcctggggggcggaccaaggatttctcgtagtgctgttcgagcgagaactcaaatgactttggtctgccaaaatgtgattatatcctgtacgtttagattttatccgcgcatcgggggcgcgtgatgggtggacgaccgttctaattccgtctggtctccttatgctctccatgttggacctcaattattttcattttttcattgttatatcgtaattctagactgtagatttggtttgcacgactgctagacgtagtattccatcggatgtaccgggttggagatatgcgaaacatggcaacttcagtctagatacacgccaatcgaccgacggaactgaatataagcctatttttatgcccatttttacgacattctataccacggcatatcattgaaaagacacgacgacccggtagtagaggccgaaaccggcatccgatttgttatcgataagcgatcaagattttcccggagatcaccaagtcccccgcgtgcaagcaacttcgcttttctctgttactgattatatcgttattatcgctctatcgccgtcatgtctgcccctaccgataaacctccctcctcctgcaaggtgatgttgagcaagaatgttgccaaccatctcctcaccgaagtccacgagggccttaagaccctcgagaagccgcctcacttggtcggcctgctggccaataatgaccctgcagcgctgatgtacgcgcagatgacgcaaaagacctgcgaggagaagtgagtctctataatattctgattatccggctccaatggatccaatggcttctttggtgggggtagctagtatgattcatacatacccctccgccaacaaaaaaaaaaaaaaccaaaaaagcctagaacgaccctaaaagcacagccaacacctcaaaacacaaccagaaatccaattgaagcaaccgactaacgcaatgcctttcccagcggcttcaagtacaccatgcgcgaggtgtcccgcgacgatatcgaacaggccatcctgaacgcaaacaccgacaacgacgtcgacggcataatcgtctactacccgatcttcggcacccgtcaagaccagtacctgcagcagatcgtcgacgtgaccaaagacgtcgagggcctgagccaccgctacatcttcaacatgtaccagaacatccgcttcctggacggcgaggccaagcgccagaaatctatcctgccctgcacccccctggcgaatatcaagatcctcgagtacctcaacatctacaacacaatcctgccctacggcaaccgtctcttcggacacacgatctgtgttgtgaaccgctctgaggtcgtgggtcgtccgcttgctgctctgctggctaacgacggcgcttgtgtttactcggttgatattactggtgtgcagaagttcactcgtggcgagggattgcagaagaacacgcatgaggttgttgatcttgagaaaaagactttgaaggatgttgtgccgctttgtgatgtggttatcactggtgttcccagtgaaaagtacaagttcgatacgagccttctgcgtgagggtgctgtttgtgtcaacttctcaagcgagaaggtatgtctttgtgtttttaagtctggttatgaggttgttgctgactgttctgatatagaacttcccctacgaggtccgagacaaggcctcgcttttcgttccctctattggaaaggttactattgttgttctgttgcggaacctgctggtatgttttatctctatacttcattcgcatgctcagtggtccttggtaacatctaacatgagaaattacagagactcatccagaacaagcgaatggacgatgtcaagcccgccgaggctacggaacgacctggcaccctcgaggcatcatcgtaggtcggtcaccaccggttgaaatttcaatctcgatggccatgcattgagctggccatttcgtaaaaaaattatagatattctgtttgttattagccatttcgattatactctgagacttatgtttcttcttttgtttcctgtgcttagatatccagtcgcattccatggttgaaacttatagagattggctctgttgcctttgtctattcttctaacaaggactgtttcttgtttaataccatagcttgttgtttacactctgactttgcataatacctcaatagaaaactgctggcgggctcgaaggatgatattaatatactaacaaattgccccgagaataattgggactggtaacactcaaacctgtaacgcgcaaagagccattcagttcaccttggcacaagcttaacgaacaaagacaagaacgatgacaagaactaacaggggaaaaaacacaagagaaaacgcaatcaggaaccaatagggcttcaacagaagaagccaccaaatgatgagatcgccccagtcactctcccaatctgcgaactcatcagccccagtcagaatataccttagcgactcaatcgctgacagttgactattatcactgatagcgaccttctggaggagttctgcaggaaacaaaggcgtttccggcacgagaatgacttgaacgtaagggcttatagcgctaggacccacgattccgatcatgcgccgtgggacctgaagcccaggtgccaggacgatgaggtggatacaacaggtgtaattcacacgccggtcgagtctctttgtctggatacagtagaaatagccatgtgaatactgttcggcggtgcgctctgtttcttttcctccagactcatccacggacggcgtagttgttacattggtcatctgttctatagtgactgaacaggcttccagtcccttgatttcaagggtctcggtggcatccacaagcgagacaatgtcttcgggggaaacccaggcaatgactactgggaactccgggagagctgaaatgatcggattgttagttcagtttctcactcaaacaccgggattcggcgcggcgagagcttaccacgaggtcgacgcagagtagatacaatgtatcccatgttggtggtctttacgactgtggaagatagttgtgaaggagttttgatgattcgaacttgattgagagtcaaaccatacagtctaagagcaagtgagcagcaaggtgcaaagttgtccgaaatctaacatcattaatccccaggctctgacttggaaggttcgagtcaacccgaggtctctccaagttgggaaagtgcagtacagctccaggaagtgatccacgtgagctcaatagccctagctaggacatcacattctaacagatcaggctaagacacccagcatataatagtttttctctcatgtcgagtgaggtgcaggtgttgcatacgagattgctttcactgccggtcgatagtgatcaagtcacgtacactgttgggatgcttctgattaactatgcctagtgaaaagaaaaacacagaagaccgacctcttccttgctcatttgaacatgtgatacccatgtactctcctcaatctctcttagagaatgaactggctttgcagtttgcaataaccctgaaaacataatatctgatagtaattgataggcaaccttcctctagccaaacttcttctcattttccttcgctgccaatctcaaaacatcaatctcgctggcaacccagcgacggaaaggctctgggtggaatacaccatctaccgagaaccaagttgtgaagggcgcctcacaccgcttgtcctggagaaccttgccagaggcggacttataaatgacatgcaacttgtagagcttggagaactttttggttgacgatgacacagatatctataaacaagtcctgttagttacctggccaaaaaaagaatatcagaacgaagactaattgacataccgtctccccagtcttcctcttcccggaatatacctcgccagcctcgacggcccaaatccagtatgtgagaatggcgttcaagaagaagtatgtccctactgccgcgataatccagggcgaggtagttgcttcccagccaagcctgcggtctgcatagaaagtaaaccctgcaattgcgacagcactatatccaagcaagaagcgaatgttcgtcttcgagtagtccggtgtaaaagcgtatggcgcgggaaggttggtgagataaggaagcagagcatcgtcgctcgtagatttgagatctgttgctcacgccgttagtgttgttgctgtatagagtatagcgggattacgtaccattggtcgagtagaccggcaccttgctggaagccataatatattcgagaatagatgcgagtaaagagctttttaaaaccaaaagaccgagtgtggtttagcagactgttgtttaccgcaggacaaagatgcggcgtggcccttgggagaaagctggagctaacgcgggccaatgacatccctctccgcctggcaacctctccttcgcggccccttcaactttccatcccccacctgcagccaccactaatttattgttggttcgaaggaggcacttcttcgattcttattctgcctcaacatggcaattcaaggggctgatcagaccatccttagggatccggcattattgtgagagaacatgattcgatcaagcggaagttggactgaccatttgcttatagctattggattctatttcccatttcaattgttatggtatgacctgcactcggtgcttgaagctaaatattcgcgatgcctctgagactgaaactaacctctcttattggatagatactgactggaatccttcgccactatgctacggtcctcatgaacacgaccccaaaggcgccatccactcttgccgagtctcgcgagcgccttgctcttctccgcggtgtgaatctccgcaacaatgcctgctccgtgctcgaccgcgagtcctttgagatgcgcaagaactacatggttactggattccgcaatggcgcatttctcaaggatcccaataatcgcggccaaccgcccgcgaaccccatgactgatcctgcgggcatggaagctatgatgggaatgcttaagggaaacatgatgatgatgatcccgcaaaccctgatcatgagttggatcaatgccttcttttctggctttgtcatctgtatgttgcaatttgatataaaacatgagcaacgagcttacaaattctgaagtgaaattgcccttcccgcttactatccggttcaagtcgatgctgcagtctggtgtcatgactcgcgacctcgatgtgcaatgggtctccagtctttcatggtacttcctcaacttgatgggccttcagtccgtttttggattcatcctcggcagtgataacggtatgcatcaatctgaccttcccaataagagttctcactaatatttatagctgccaatcaaatggcccagcagatgggtatggctaaccctgccgcaatggtcaacccgctccagcccggccaggatcccgacaagttgtatctgaacgaagcggagaacctggaggtgatggagcacttctgcattctcgatggagtggaagagagaatcttgcaaaattttgctcccgcagggatctaatttccgttttgatgtcccatgtgatgtctagtgttggtgtatatacctgtcttgaggtcatcgctggttttggatagcatacagaatagaatgtgccatctttgtaaacaagccgtaatctcgtgaccacatgatttactcgtgtcttctcgaatgatttatattgctcaatttccatgactcgtacttcataactaatctcaatcactcctggtggtaattaataacatcgttcagaatccagacttccccattattgaccttctccgcaattgaatcaacttcaatattgccaggttggatctatagacagtcagttaccataccaatgacttgtaggggataaaacctacaaagatcttatcaccctccttcgtccatttcaacttctcccctgcaagactctcaacttcttccccaattctccaaggactagccgggatgagatgggcctctacgaatcgctgtagattccgtttcgcccggtcttgaccatcctggccttcatatgcatttacctccccgaacttcttgtaatcctctggattctcccagggcttccgtggaagagcctggattgcactgttgcgtggtgctagaactgttatgttcttggacgcatcgttaaggcggctggcgatgggatcaaagtcacgggtcaaccgcgcaaagatattgatgcccttggtcttgggcaggacatctgagatgacagggctagcgctgtctttcgaggtcaaatcctcattcggaaccgtcttctgtggctggacaacaccagggagaatcttatccattatggatcggtgctcttggtgctcgagagctagtggctgttgacgcgaagggaagggagatgataggccccaaagtgcagatgcagatgtagcgagaagaaaagtaaataaaatggatgttagtcgattcgatttcatgctgcgggttggagccatcttgctgccaatgatgctgggcagcgaagcaggtctacaaccatgacgcaacaggcagtggcacgtgatgtggagagataacagaatcacctgatccttatcgataagggcatccggccacaagaaattggccgatgtgatcttgatctttccccccgcaatctacacctgggtctcccaattgatcaattggtatcatgtcggctttgcagacctttatgctggtcgtggaccacgacaaagaagaagccaagcgcattgccgagggaagcgcgcatggtatgctaattcgccccgcactcgagcccacttcaaatcgttgcattactaacggaagcgatagatattgagattaaaaaagtgactttgcttgatactgtccaatctctcggcgaatatattaacgacgaagacccgatcttacgtggaaaagcgatttccttccttacggccattatccaagccctctcgccgaaatacctctcgagacaacagattcaagtcctgactacattcttctgtgatagaattgaggatggaggtgctgttgatgggctgcaggccctgcagggcttggaccgttttaacaagtttttggctacccaagtagcgcaagcgtaggtgctatacttttacatccctgtattcgccggggataaagcttaactcaagatgacccagtgctgatttattgatatagacttttttccaactttcaagatctccagtctcggtctcaaacacaacgattccatgtctatgaattgcttaatgacttgatgtcaaaccaccgcggagctatgcgtgatatgggagatatctcgcttctaggtgttgttgatattatgacgggagagaaagacccgagaaatttgatgattgtattctcgatcctgaaagtggtcatggtggaatgggacatttcgaaccacgttgaggtatgtgtaatttcccaagctcggcgatcccgctaacactagacagactctcttcgactcggtatataactacttcccaatcacattccgacctccgcccaacgacccttatggaatcaccgcacaggatctgaagggtcgtcttcaagagtgtatctcttcgacaaggcattttgcgccccactctatccccgccttattggacaagcttgattctacttctcctaatgtaaaggtaaaattgctcaacactccgtgattcgaaagccgtctaataaatctatagaaagatgcacttaatgcattgatcgcgtgtatccatttatacgaccccgacacagtgtccaggtattccattaccatatggggagtcctcaagtttgagattctcaatgcccaagaggagttcttatccgaagcctccctcgaggctctgcaagcaattgcccaacggctatccgaaggagttaccgaagtgtcgcaagaattgcctcttgcaaagtaccttcagccaatcaccaaggagtgcaatgagcaactccgggagccccaaaacaagaaggccaatccggcccaatcgatcctcagctgtgtgtctgctgcttcgcccgtttcctttgtccttgttgtacaaacagtcgtaccgccgattttcacactttaccaagaagcagacggaatcgtcaaacaaagagcgcttctcgaaactttgaatgtcttgttcgattctgctacaaccgtgtttggacagtggaccacccgaggtggtgaggcggctatcgaaaacccgctactcgaatttaaagaccaattctcagacctttttggtcaggtattgatgggtgcagcaaaggaagaggtttccttccgggtgactgccttgaaaggcttcttgcgtctgtcgactttgcgtgattacttccaggagaacgagattgggcttttcgtacaataccttgacgaaatccttctcaaggaggagtccgtgggccgggatgatctcaagaaagaggcaattgctgctcttgctgagatttccaagcacaagccccgcctgatcgtggatatcactttccctgcatttgtggcaactctgccagaggaagatgaaggatcggatgcccggtatctgccgacgctcgagacccttgcccagatcagcgtcgagagggacatcttcgagacacttttccgtcgtcttttcagcaaactgtccgttctgctgcaaaaggaggaacccgggtcagttgcttacccacgtgcgatcctcgccaccttgctttatgttatgcaacagagaaacatggaacaagaccagagtgtggatttgtacttcgacaaggttgtggttggactttgccgcgatgtcgcagcatcggcttctggcaaggccaagaatcggattctcaatgatcctaccgtgcttgacactttgggtcgactctgtaatctccttgtgcggtctgtttccattcagaaacaggagcaagttgccgaaaacgtctacagcctcttctctgcagctggagatttcgtgcctcttccgtttactcagactagagaagccgatcgagaacgtacgatcattatctcgacatacctgctcgcgggattatccaaggactgtggtaacaagatcccgcacaccgacccagacatggcggggttgctgttggatctgatctatcgttgtgtcttgagcaccgaaccagcaacacatcaagcctacctgcgccacctggccttgctcgtcaacaagttcctgtcgaagcaggatgtgccaatcgccgagagactcattgattctctcctcgaaggcgagaacacagaattacagagcctcagtcctcctatcattcgcaccatcttctggctatctaaagcattgatccttcgcttagcccccgcaacaactcacatcctgacctccctcctcgctctcctctcctccctagaccaagaaaccagcgcgacggcagcacaaggcttctccataattctaggcgaagacgatatcatctccgcaaccaatggcgctacaatccgcctcctgtgcagacagcgcctcttcacaacagtcatccctttgatctccactcgcattcgcgaggtgaacatcgccggcacagatggctcccaccccaccccaaaagcgcccgaccatattaaaccagcgcacctaaccgccctcgcgggtatcctctccaccatccccacggccctagtcatgcctgaactccccacccttctccccctcctcctgcaatccctcgacctccagaccgccgactcggtcgctgtccgcacagcaacgctcgacaccctcgccgtcatcatccgtgacaacggcgtcaccgtcatcgaccggtgcggccacgtccagagtcttgtcacgagactcctcaaaacaacatctacaaatatcggccctggtgcggttaacagcccccgtctccgcgccgatgctttgaaatgtctcaatctcctcgctacgcaccaggtgcccggcgctgcagctaatgctccgccgggtatctcgcctctattacctgtcaagaatcaggttctgaggtccttgcgagccgttcttgacgaccctaagcgtaatgtacggaaggcggcggttgatgcccgagccgcttggctgcgttgtgtggatgatgcaccggacgaggaagaatgattatttttgggttaatggaaaaatatactcgcattaaatttagaggttgtttattatcatatattgagcatagatggacatcggggtttccagttctcgttggtgtaatcgcagaaggaattcgagtgcagtataaaattgtgacacctctgctgtgactgtaatgtgccagatccgaagagtaagagtacatctaattcaaaccaactaagactgagagaagaaggagagagcaagttgagagtgaatatcagacatctcgcttagctagtaaacattctatggacaaggaaaatagcaaacagggagcaagcaagcagaacaatagctgagtcaggacagctataatagtaattgtaaaccccaggagaatgataatactttctgagaacatttatatatcaaattcggaaatgacttgactatatcttcaaagaaagagctctatatatgattgacctgcacccacagcgtctagtctcacttagaaatgcctcgcgcgttccattagatagaaatatatcaagtgaccacaatctccggtatataaagtcctcgtcaactaccttccaagcttccatcacttcccagtctacaaaacagtcctggggagcatataagaactgcatcatttcaatatatcaacaatcatgatcaatatatcctgtttttctctgtgggcttctctgtcctgtaagtttggttcccttttatttcaatctcttttttatttgtctctttctaacttctagccttagtgcccctccagcactgcgagggcgtagaatccatcgggcatctctctcttgaaatcccgaatgggtggcgttcaatgcgcgatgggtcatccagctcccggtatagcagcgaaaatatacccacccacaaaaactttaatgatcactatacctccaaccaaccgcgattctgcgccgagcgaatttattcttgaggatgtggctgagctcttccgaaggaattgccggcgcagatggataccaggctcgctgggcatccaaggttgtccctacgtctatgggtttgatgtagccaagtcatcgctgaaatggttcaatgaggtgctgaagaaatccatcgaactcttcatcaacgctgcatacggggatcggttcaaggtatacacgcgggtccgcgctgctgctcttcgcgaaaattggaacacgcttaagtctatgccgatgctgacctacccgccgtttccactctacgattgctgttggcacacccaggcgaagagattcgagagaatggaagaaatccctggcattgacgacctccgtgtctaaattcaccatcgaagacaagagcgaggctggtctcacattaccgcagagggccattacttcaccgataagttcgaaatacctggccttatgcacgagaacgacctacaaatctccttgataccacaaatacgaaagaggataaggacgtgagaagagcagaaaacgatctgcaggaaaaccaaaccaaattcaagggtattccgttttcctggaagtcgtcggcatggcgaatctcgccctggtcttaagggatactcctatcattgggagcgttaacggaaaaccgaaaaagccttcaaccattgcctccgaaatcgtgggtggcgagctttaagaatacctccagcatattgaaaatcctattacaaagaaagtcttccggaaaacaggtgcattcctcctcgtcagaggcgcacaaaacagaggttttccgaatcggattctgttaatatggaaccatcacaagcattgcaagaaccataagccgaagcacgggacctccaacagacccgacttttcattggcagtgaatcaaaattgaattccgatgtccgattttgggggaactgttagatcggatcatcagagacccgcgatgctcgctctaccgcattctccaccgcggtcgaagagtctcaactcttcacgccagctgagcgaagaatgggagccgggagccacgggccccgaaaacatccccaacgtcatagggcttcaagacgcaaatggcaaaaccaaactcaaggtggttggagagttaaagataccctgggtcgatgaggatcctctagtgtccactgctaagcaaagtgagcttcgcgcaacctctgcgggatatgcagaaggagttgaccaccccgaacagctttactaccgcatccttgacgccgtccccaggatgccagccaggggcacctacaccccttttcaattcgcagggggcctgttacccacgtgactacatagctatagccccgctactatcatagacaatacatcatctatcttcccctgagctaccagcgtgacagggcctccaggatcatgtttcttcccctgagctactggtggatcatgaaccctcatgatggcaatgcgaagatatgttgggtggccagcaaggcggtcacccagtggagccagatcccactattagatagaccagatagttccgtccttcctcccttgtcctctcctccttgtccatcatcagcaagagctgccggagcatgtcacatgagatcaatctccagcaggaggtgaaaggtactgcacgtgcccgtacagcaacttcattcggaagcggagctggtactaccactagccagtcctacaccccacgtgtgaagcgcgaaggaactacgtcgtcgtccggactgtcagccatagaatgggagaccctgatgaaggagggccgatggttctactgcaaagagaaaggacacatgacgtttgaatgtcctaagaagaaggcgaacgtagcccaacaaaatctactcctgtcttttttcttacgatactatccatctagtagatctctattgatatatgcttacctctctggatcaatcgatatcggtcagaaactaggattgaaaagccggagaggcaaaacaacagggccaatcgctactaggtcaacacacgcattgagccacttcaccttcgagatctataccaaatgagttgcgagatggaatccttcctgataaagtgggaggtaaatgtgttggatctgtacataatattaatacctacctaactacatcactggctacatctgggtacttcttataacaatcctggctgctccgtcaacacatttatggtgtaaacttcactacctcagcccagtttatcttctataaaacggactggagtactcaataatactgtagctaaaaccatagggccaaactacacagctccataaagtaatcaaacattgtttttttaatttttttggtgtcttaaaatgcagtatcaatggaaaggatacaatctgtcccgtttccactccaacccccgagattcatcttcatcactgtctcatcaccacttgtgctttcccttcaattcagttggctgattccagggaaccatttgtttgcccaaggtggatgacgccttgaccatacctgtaccaccctggctgcgaccagtcgatgtgttagcacgcttgtcaagactcgcaggacctctgttccagtacccgacagcatcgatcttctgcaccacggttttggcaagttgtaacattgctccaattcctgaatggccgacttcgcctccgagggtgctcagcttctggtttatatcagagggaaggaccctcctgacatctgcaccgagaagatctgttgcacaccaggactcgttgcgatcaccgggttcaaggaaggaatttgatttcatgatgtcgtccactttgctgctgacaatcgaggcctgccaccactgctttccatccttgaccatcttctcaagcgaggcgttttgcaaaaccgtgatactaggatcaaagacggatggggtggcgaggagttcttggctttcgctgatttggagaaacaagcctttgctctttttcgagcgataagggtgacggctccatcgttccatgaacaccttctcaattctgatctttgacgccggaggagcacggaccagcatacgaagatgtttattgtttggctctacccgaatgcttttcgccatcattcgtgcagcttcgtcaagctccggatcagcccccgtaatgtattcgatgtaaccatgtaccctagcagctgcatcccagacttgtgaagggcaactcaagtgcacagtgcctagggagacctcgggatagcggatcatagcgtgtccatattcattgactgaaataacaatggttctgttcggaccaacgcggcaccagaattcgtactttacgcctcggtggctgtactttcggtcgaacagacgagattggttgacctccaaatcgatgaggtagtcaatatcggcaggagatgtagtcaagcgctcgaagaatgagattggaggcggcgtcaagttattcttagagaagaacagctggtgaacctccctatagctcatctccctctctttggttgaagccggtaggctgggcatgaacataagcccgaactggatttcaaggctcattgctccagggaagctgcgaactgcatcaaggattggttgaagaaaacgaaacaaattctctgttgattcatgcatctgcttcttttctcttgatttcgcagccatcttcatggacaaagcagtgcttttttgtggcagtgcttcttttgcttttgatcctgttcttcgctgccagttattagcaatgggggcttgaacgttttctccgttctctgcattggttgtgctgttttcattcccctccccggcattagcagtgtggacttcaatatctgcccttcccacggcattaatcacttcatccacccattgaaaggattcgccgcaaggccgctgatgatacattgacctctggaattctcttgtctcagtttcatccgagacagcaagcgtttcaatcacttttgcttccgcatattgctcaccatcttcagagttggattgcaaaagattaggcaagcgaggataaagcatctgaggtgagatatcaatgaggtccgggcaaagagatggcacattctcaacccactgaccaacgtgttgacgttgctggatatcaccgtgcggagcactgccacccgagctaaaagacagagctcgaggtacagggtcacaaaggctagcatcaagaggtatcgcaatctcctcaatgctgggaattcttggagtagaattttccttgatttgctggagcaaatattccagtgctacctcatcggccttgctgcggaatccaggggcctgttcatgttcctttccgtcgtccgatgcggcgctcttatgatcagagccagaaacttccaaatcaggcaatggcgcacttgtagcgagccctagttggacaggctcactagtaaaagaggctggagtcgtcgcacggagcagcatcggatctttatttaggtcgggataaagagagaaactctcagttagctgaggctgcatagctgtatcctcgatattgggcatatcgaaaatatcaccagtttcagtaaaattgcgagccttgacatgctgagcatatgtagattgctccggaccacttgatcggactgtggctagcggatcgaacgcaacaatatgttgtaagccactgttgagactgctcacttcacaatcaagatcgatgagggggcttgtgttctccttttctctttcgctgcgatccagctgggtggatgtggtacttggctgcttttgatcccttatcgttggattgttggacacttcgtctattccagtttccctcgtgatcttggtcttctcaagaattagctttatctctcccatcactgaatcaacacttcgcccttgagcctttgtattcacctgtaaattcactgtctcgagtgtgccgaaaagctggcccttcttgactcttggagaacgaattggtcggctcagagggctatttagcttctcttctcggttagcgggagagatagccaaatcatgggacgtttcccccggttgtttgggtgctgtgcccggatgagtggataggactgggcgacgaggggtggcatttgagtctgattccctagtagagatagaagccacaggaccggttgcctcagacattgtttccggttgtttggaaactgcatttgaagcagtaaagtcagctgcgctgcggactatactcgccagtcctttttgttgagggactgagatagacgaaccggctacttgttgctcccttattctctctctgtagctgagtctgccaaacagagagatatttgggctatgaggagtgtctggcttttcttgttgagactggttaatgggtacagttccatcttgtagcataatcacgcgtcctttgacgccagcgggattgggcttgaatggaacggactgtctcttctcccgtggggcggaaacgctgggcgcaggttggagcttggatttaacaagcgtaggggaggtcgtatcatcttccagtgatgctcttgtatggatgttgcttgccataggccgtttggtgacaccccgagagatccatttgtcgacgtcttttgccttaccagtcgagagatacgggtgcttagtgtcattcctctcataaagggcctcacctttgggcgcgatatgttgatcaatatcccccagaaagggatcgtttctcgggccgatctctggaaaatgataatcttcccagtctctaataatgctcgctttctgagccacttgcggtggctgacgaagtttgcgaagtggacaatattggttagctgactcgtcgaattcgcagacgaccagagtcattatctttgggagacgaagagaggcatttaagtcgatcaaaatacgccacaaggcagtggtactgatctgtgcatatgtcatgatgcgaaaggtagcgtcctcctgttgtggagtaaagacgatcagtcctcggtttgtgttctcaatgagatcctagaaagtattaacatacaggacttcgaaacaaggactcgggactgtaccaaacattcttcgaggcagtcgagtatatccattgcctcatcaatgttgttcatgtattgtgcagagatacggagccctcgggctccctccactgtgatttgtgttttcgtcattttggaaatgcgaagtagaagagcgtccgagtcatgagagatggggcccgttcccatctgcgagggataccagaatttgacaatgagtccatcgctagtgggttgtgccggggcaatgtcctctactagggtttccgtctctgggagcgcatcgctttcgtggctaggaaagggattggggtcgaagaaggtagagattggaagctgacgaattctcgtcgtcttgggtgaagcagatattaggtcaatataacttagaaattggggaggaatcaagacatacctcgagcagatcatcattgcgatgctcttcaatgtaattcgcaagcagcgatgtgattttgacatcaaattcctcattgaattgacccgtaacaaccaagatctagacacaattagcaaagtcatagcaaatagtacaaataaatagtacagaaaaacctacatgtttatcacgttgatattcgaccttgatcgaagcaccgggattcaatgctctatgagaagtcagttttgatcaagataatatacatgaatagtatgcgtacttgagtttgtctcggatttctgggatctatatcgagtccggtcagtcctagtcatacagaatgatgatcatgagatgttaaagtgtagacttactccttggtcctccagtgaccacattgaagtcaaatgaagtgtccggctattagccattttggacggtgtttgagagatatgcggagttgaatgtattgacgtgggatggatgtgaagcgattggagaccgacgtcaggtgaacggatccaatgacccggagacggaaggttttgggccttcaatctatttgaagacgttaattgggttgaaaggggaatgaaagaagcaacccagcaagcagtgggttgattggacccaagagaagacaatcaattaagtaagaggtaggtgaaggcaagtcgagtagagaagaacaagatgagcctcacctagataatcgatttgatagaacaggctgtcatgaacggtgcacatgagatgaagataacggacgaaagacgaggaagagagaagagagaggaagatgatgagagtcaaatgaatatgatttctattattcagcgacgatggaaggaacaaccgcgtatatcaaacttggaagtcagtagcaagtgacggaatgtgaacgcgcgcagtgctatcttgtatccaggacgatgagattggagtatagcaattcaggaatatgcggagtgaatacatagggcaagttaagtaaagttgaaagagtataaatttctgagtcaagcgtaataaaatgcccataacatctaggcagaaaggaaatatgcagccactctttaaaagccctttgaacacaagcaagaaacaagacttgccatgttcaccacggtgtaatcatgtccaggtaaaaatatgcaggtcgtcaaacgccatatctaacaagggggtaacagtacaacaggaaaagggtgaaaatgcagagtaagaatacaggaatacaaaaatcgaagggcacacgaccggaattgaactctgccacgggtatctgctgcaaattgaaatgaaacgccatgcaccggccaagaatggtctatgagaaatgaacaagagtggtaggatggttgtcaagacgggagttgggacgggaaaagtattgtccggcatcaattcggtggtagattttgaggaatctgagcagtaaacagagagaagagggggtggagagagatacttcgcatgattgaggtctggggttgacacaaacaagagacaacacgaattattcgccgctttgttcgctgctttgtcgacttgcattgagccggattgcccatttcatttctgtctcggtctccttgagctgagcaagaaccccagcgaccatattattgctggccttggccgactcaattgtctcgcggaagtcgttatccttcaattccttatatgcggagtgttgggcgagcagcttgtcataagattccttgagggagtcgaattccctgttcttctgatctgcaagaacctccagcctctcggtggagagtatatgtgtcttctgcgcgttggcgagagtcgtgaactcggcccatatggcattaatgcgttttgcaaactccgccttgtcgcgtttcaaagtgccggacaatacatcgtactgtgtctcgtagtgtttggcgatctctagtgaccgggcttgttctcgattgtgattctcgcgctcctcctgcatagtatggttggtctggtttgagttcatttccgcgtcctgacgcttggtgcgctcgtgctgcagctctattctcatttcctccagcttccggtctttccgtgcaattgagttgaggttggtctcgttgacttgctcgaggtttcgtagacgctcgttcatgttttgctgctggatcttgtaggcctcattggttctctggtactcctccgagcgggacttgtagagtgtgcattcacgcgttaaccgtgctatttcttcctggagattgtggatcacacgtccggatttccctgtcgctgcatggccaaccgctgaccattctgatgtgtgggaatcgccattgctcgtgtcgacggaggtagcggatgggtttggagggttcgaatgagacgagagggattggttatagtcacctgcagggtggagattgtaagcttggaaggtagagggagtgggtttggaatcaccaaccattctggccttcggtggctggttcgtcgtcgaggagtccgttatgctggtgcatattcaattgcgtgtccacatgcgggagattgacttgtggcgcttctgcacggataggggggtcagcagcaatcggcatgagatttttgctagggctgagacgcttcatgacccgtttgaagccccccatggtgaccacccgcgcctgtcatgaggaaccagatgggaagagcaagatgggagcaaaaagtagtgagcctgtgaagggaaaggcgcataccagtattagaagtcaattgagcaagatgtgaggtcgttgtcttatggtgttgcttattcatctagacatcgcaaggagtgcctctgatcgataaaggcgctgtctcatgagatcttcaaagatcatcaaagatcactaaaacaaatgatctcagcagaataatccaaaacaatgaagtagcggtaaagggttgaagaagtgggagatcagtcgatcatcgttctttgtgttccaactccgcgtccgtcagggagcgccacggcgctagcggcgagcgacaggtcttgttttcttttctttgctttttcttgcctttctttttgtttgtgacgcattgaatatgctaaatgtgaattgattacttcctcaatgccttaggccacctatatatcaacgatatctgatatccaggggtattttatgtacaggaagttataccattttgttttcgaactccaccaaaacaccgaagataagaccgacaacgccaaaacagatgattgacctagacaaggcaggccaaaagaccggcaatacccatcaccaattgcacggagtattgtgggatagaagcagcaccagtctgcacgcttccggttgaggatgcttttttaccatcgacaacctcggtgctggtagccatcggcttatcggttgagctgacgtgagaagagctagaagggctgcctgatgagttgacagcagagttgatgagggccttgctggcagtgctagtcattgtggtgtgggttccatgcgttgtttcggtagtaccagtggtctgggtgttaggggcatcagtggtctgggcagtggtaccagtactagtgccagtagtgttttcggtgccagtggtggtgccagaagtaccagtggaggtatcagtagcaccagtagaggtaccggtggctgcagcagtagaagtagcagtgccagtttcggtggtatccttagcctcgggaatatcggccgcgggcttgccggccgacttaagcagagcggtatagttagtctggtctttctgcaagatttggaaggcataggtgtcgcccgatttgacatcgttgtcaggagtccaggtgaaggtgccgccctttccatcggtagtgattggcttgacatcctgcagatcgcccgaggaaccttggcggaggaggatggtcacaggctaaacggggtcagatttgttatgagacattggaaaagatgcgtattacctgaccaggagtcgcaccagtccatgtgagggtgaccggcttgccaggttggagaggctccttgggccaggaagtgaaggatagagggtcggcagcgagaccaagggacacgaaggaagccgtcacggcaataacacccttggagaaatacattgtgataaaagaaagtcaatagttggttggactttaaggaaagtaaggtagttagaagattgtgttgtattcgtgacctgggtgagccggtgacggagaacgcgatacaacttcaagaactggcgcatcgcgattcttaactggcggcaagaattgcccagatcccctccagccccgtaggagtgagctcgaaagtcgcctgttggtattccgctgagaccccaggggcgttttggagaatgttgcattccgatagccctaacagcgaagcatcaatacgttacctaaggaagcatgtctctaccttggctggggaatgcctactagtaagaattggaaattctcgagacgaagatagttcaaaacttgcctaggggagattgatcagtcattatggtgggagggctatcctgtatctttgatcgtactaactaggtggccgcgagatggcttcatttttctaatagttgccgaaagtccacaagaatggttcgaccgtacaatgaaagactcataactcatcgatgagaagacccaagtatggtagcccaatagcacgactcctcgcgacatgctggaatgctatccctttccgggttgttttggtggggatcagtctatagggctgcggcgaacatcaagatcatttctggtgtctataaagcatttcttaggtcttgttatactatggatctcataccaaggggtgccatatggtgtggtgcaatctaaggctggggtagcttgatcgccatctatacagcacgaggaataccaagtatttccccagccttccaacccaatgacccagttctagagatattgcaaggcctaaactcatatgggataggaaataagattagcaataacaataatggtacggggttgaatcgagttgatagagtaatgtatacaaccgtgctgcggaactcaagaatatatctctcatacgtgcaacatatgctatgtctcagtgccactctagcctagcctatactagtggttacagagcaataatgggcccaaaatatgtcaagtacgttggctttcttcaaattgccagttgaagttccagtcttgtgatcattaccgaagcatataccttcaagcgttggtcagtctaggtttagacttgcagcaagggatctgttgctagacgatcatttctcttccaggcagggaactacaactataccccgcaatctaagcccttgagcagagttcattgttaaacaaattgaattggtatacgctgatatatgaacctcagaactcccacaaatcccgcatgaaacaccctggaccagagtccacaccaccatcttcctctagtagacgatctgtgaagatacgcttgggaatcatatactcgacgacaggaatcttcttgagatttctctcttccactccaaggtctgcagtcaccatgcccgcgtacgtgtgatcaaggaaatcctccagactgtatgattgctttgtgaactgctcggaaatgatccgtgcaatggccgcaacgttggggtggaagtgagattggagcgtctcgatctcccaaagactgctctcaatggcgttggtcatgttggggtcgggctcgtttggatcgaacggatcgtccatgccttctttttccacctccgcaaggagatccttatcccgaatagatcggtgcatcatgaatgtggtcgtggggtgttccttgaaaaagttgtacatgaacggaacaatcaccacaatggcggagggaggggcattcaatgcaagacgagcgagacgcttgatgaagctggcgactaatgtggacggaagatgggttgaggacaagaaggtgttcagcagtcggaagaatcgtgatctgtgcttcgagtgcagcagctcggaatcgaggagagagtacagcttggcgtagaattgagggtagtccaggttcttttcctggatcaggtagaagagaccggaaagtgcgaggagggatgtcgcaccaccgacattgtatgagtcggtcaagaagtccatcagcagttccggtcggttgaaccaaggttcgatgttatgcaccatcatacgtaggaggtttttgcgctgcgattgcgagaggttgtttcgtagaatggccagccatgcctcctgcgcctgcttcctgtgggagtttgccgaaactaggcgcttattcttggtatctcgtttcgcgtagaagttttcgaacttgtgttccggtccaggaacctcgtcgcaggcctgaaggatcttaatcaggatttcaaggacttcgggggatcgtttcgtagaggcataatcactgatacaagttagcccaagactcgactgcgaagaatatatacatacgccatctgtgtgaaagtgtgatatctcacatcctcgtactccttcacaaacttggtgatggcttcggactgcagatcctggccgttgtgggcctcaatgatggccgcaaagatatctttgaagaaacccgtcgaccaaacattattctcagcacctgggatatgggcgagacgttccttgacaatgcgcatgctcagtgccagagcagcaatctagatcatcagtaatagtaaccccgccagatcagagcacacatacctgggaggaagcatctgcctcgcgcataatagccacaagagcattctgataatcaaggcaacgctccttcaaccatgccacaactattttctcgttctcggccgcacggctcgactcggtcaaatttcctccggcgatcaatcgactgaacacacggcaaagagagacggccacagccatctctggtttctcggcgttgttctcgacattgagcatggagagaagggtcgcaatattgttgtagccctttcgcgactccgcaatttgattctctagctcttgaatagtagacagtttctcggcgaaattgtcctcggcgacagcgcggcgcttggaggatgggccgctggcatttttgccgctcttgcgctttttagagctcgaatccgtaacaagtgcaggcattttgggcaggcgtcttgtaatgccgtgaatagtttatctgcaacttttttttatcgttcagaccatctcggatgctggtttttccgaggaacggaactatcgcccgaaacggctagcgtcttcacctcctagccatcccgaacctcaagtctcctcaattccgttcacccaccccatagaccaagattcttccatctgcaacaatggcttcgcgtcttgctaagagcgccattggtacgctttttacgaacctcgaccgtctgatcgactcaatgccttcagttactaacgcaccctaggcgcatcccgacttcggccggctctttccgtccgtggtgtccctgccgtcactgccaacctgacctcctctcgtcaggcctccaacgttcccgccgaggagcccgcgaagaaggcgcagtctattctgaatgccatccccggcaactccctgatcagcaagaccgccaccttgtctgccgtcgccggtctgtccatcgccgccatcagcaacgagctgtacgtcatgaacgaggagaccgtcgctgctttctgtttgctttctgtcttcaccgcagtcggcaagtacggtggtcccgcttaccgcgagtgggccgagggtcaggtccagaagcacaaggacatcctgaacgctgcccgtgccgaccacaccaacgctgttcagcagcgtattgacaacgtcgcccagatgtctggcgttgtcgaggttaccaagcagctgttcgctgtttccaaggtagggatactcggtcacgtatgttgatacttgggtcggtgttgacaatccgtttcaggaaaccgcccagctcgaggccaaggcctacgagctcgagcagcgcactgccctcgctgatgaggccaagtcggtcctcgagtcgtgggtgcgttacgagaaccaggtcaagcagcgccagcagcaggagcttgcccagtccgttattgccaagatccacaaggagcttgagaaccccaaggttctccagcagatcctccagcagagcgttgctgatgttgagcgtgagtaatccactaccgactttaaggaggagtgctaactattctcaggcatcatggcgtccaaggccctgtaaatgggctcactgcattcggcattgtgtacaaaactataagggctatttgcatgccgagttagaccttgcaataccattttgattctttctatattcggacacgtgcttcaagacatgttatgaagcgagtggggcttgaaatgcccagctgatgcccagcatatgaatctgttttggcctttcatcgtagaacaccttgaccagaatatgaaatcagtgcccttttaatgtatgtgactagtaccacttcagagtctacgtagtatatacttgcaagcaaacactggccatttatttaccgaggcaaggctgagtccatgcgcccaaggtggctctatgcaggtctaatgcagcgccaccaccggggccgtggagaatgcgataagagatctatactacgatttcgtatagttggaaaattcgcaaatatcgctaggacatctaagtatttcaagtatctaatattccataattccattgtgtgcacacgggatattagccgctggccaagaccccggcccccgtcaccagcccgtgtaagccggcatacacagccactgttcattcattgtggttatttttcatatcattcatcctcagtcctacaagtattcctgtaaatacttctctcccacctgaccccacacaagaagacccaagtccactcccggcgccatccgacaagtagatgcgccatgccctcactacgtaacatcctccacaaacacgacgatctcagcaccacccaaacacctcgaaatgcaccagcaaacccagcccctgagttgaagctcatccgtacagacacccatacccaagagataatcgtacctccatcgtacccagacgacccaaccccatacccatcctcaccatctcaagaggagcccacatctccacgccggagcttccagttctttaaccgctcccccagacggccctctgtttcctcgcagtcccctccccatcgcgagcgccacctctcaagcttcctacatcaccatcgcagtcgcagtaactcgcgtgactcgtccgctaatatccccgcggacctaccgcagatcgaggaggatcgcggcgcgagtaagcaggagcgcgaggcgctgtgggagaagagggctactgtgcttgtgcagcacaacccgcagtttgcgcactccggttcgtctttgccggtgcggcagggcgagggagaagcttcgctgggtttagggttggggcaaggggggcaggttgggtcgaggagctcaagtcagagtcgggttggtgtggatccaaatcaggatgtaggtggtgttgcttatatatttgcgtgatggttgtcgttgtcgttggaatgtggggctgacgaattatagattaatattcaagaggcgatccgactgcacgaatctggtggtgagttttgctttaatctgcagttggggatatacattaacattgaatatagatctcgagcgatcaactcacatgttcgaacaacttgctgatccaaatggcgcaaataatcctctgagtcaggttctttatggcctcgcgctacggtaatcacgccccctatttctcaattcatagatgctaatgtgtctagacacggatggggctgtcctgtagatgcaacacgcgccgtgacctatctctccgccgcagcatccaattccgccgcggttgaggcggaggctctgcgtgccggagttaagaaagggggagttgcgaaaggcgagctcgttttggctatcttcgaactggccaattgcttccgccaggggtggggtatagcgaaggatcctgctgctgctagacagtattacgagaccgctgcaaatttgggtgacactgatgcaatgaacgaagcgggatggtgttatctcgagggatttggggggaagaaagacaaggtatgtgtgatttccacttagatatgtattctgtgtgtgcctattctgactcgatgtggctatagttcaaagcggctaagtattaccgacttgccgaggagaatgggtgccctactcttgggaattcatggtatgtgcaactgactgcgatatggagtttgaatctaatggatactataggatctggaaagacaagtacaacccgaagtaatccgctacaacaaaggtagctatcattagctctttactacgacggaggtgattattatcacctctatctacgattcatgtgctttacggtcttattgcttgatgtatctttaacttctacgtgtcacgtcaaacattcatggtcgatgtccaaattgaacataatctaaaaccatcacgatgtccatagtcacgggtggatctgtccgcgggaactaagcctgatttgggctagtctgctccatagaaggggaacctcagctcctttcttcaacttacacatatcccatctacttcttgatcttctatatggaagctgagacatcttttagtgcatttctcgaaacatgtgctgacggaggtctctaagcacctaagaacccatctttagtagtggattaactactgagaacctagctaaatcaaaacgtatctcctgaggtgcagaatctttgaaccgagttcagaatgtttcggcacgaggagtgcaacaattcctcttctagtctcagcatgatggttacgcagcttgcagccgccttcctctcatcctagtgaaaggagtcatctccaaatacacgcatacttccagtatgttccatcttgctcattctttactttactgaaagtactgattatctcttagacagattgatgcactaaggtattgtaagtaagtaatttgtcatgtctctctttgcccctctgcagcctttgttcttttgtcccacaaagctatatagttggcttcatggccgggatagcacttatcacgaacgatgagcggtctcgcatattgagcaacctttcattatatattgatatcctatatatacctaggcaaccaggcaaatatcatatatccttagagtcattgaagaatgctccaggaaatcgtcaggaagagggagtaccctatcaggtgtgactatctgaaggtttgttagatcttctcttcctagtttctagaagagctaagcgagctggtcacgagtttgcagggtttgcgtggaaacgtataaaaccctgcaaacagttcctcctttctctttcctttccttctctcttcttatacttactgttctgattgaactggcatgtaacatcaaccgacttcacggcagagcataccttgcacttgctggtgatattacagattatcgtggatgtccccggataggacatgatttcgaggccaagatggcctatcatggtcctgggttattctttccatcgatatcacatattgagctccgtcaaatctcggttcaccattatcctacctttgtcgaacaacctctgcacgttgatcattccagtttcactttgctctcaccaaccagttaagtcaggctctagtacgcgctacttttggctgtatactgactatccgatcatctctaggacctctatatagccaaccaaatcggcatcgcgagctcgtccatgtgggtgacgagcagtgactttgggcctcttccaacaatcagatggggcagcttacaagtcatgtttacattatacccgagcctggaagcgtggtgcttcgacctgtcttatctaagacaatggctgcagcaagaaggttttaccgatgcccggaattgagaatgtctgcttgctcctccaagagttccgcaccaacgtgagaagggtgattggtaagggtggtcagaaacaaaagttgacgcacacagccccgaatgtgccagaaatgagaatgccagctgtttcgcagccaactcagaccaccttggagtccaccgagtctgttgcgaccgagcaggtgtctacacaagcagtcatgagtgagccaactgtttctcagccaactcagactgttctggagtacacccagactgtctcaaccgagcaggtgcccaccgagacagctatgagtgtgtcagctgttcccgaggagttttatcacgatacggacgaacatcaataaaccaatctcctcgtcgaaacgaagaggtccagagcgcatgagcccggccatgcaagaattcgcagaggtggttgcatggctgaagagtgatctcgccaaccacactagtaggagtgccatttccttaactagaggctggcaagtgctaacattataatgtataggcgccgttttgttattccgtgcggcctccagccatcttacatctcctatttgaaatagccgcaaatgctatcagtttggcatcgttgcaacctgcttcacatcggtgctgctattgttattctatcagcgcggctttggcgtaccatgtgtggaagaggaacctgacgaacctaaatattccgatgagccagctaggctctgagctgagcagtcatttctgattacgatcaggggccccaaattatacctgtgatagttcgttgctccaaaccgtgcgataccttctccattcactctttatctttcaccatgggaggcttcatgatacctgcctacacttgctgttcgctttcagaatccaactatcagtgcttggcatgtataagatcgggtatattggttgggctgcatcggtattcgcacgctcgtccctggcatggtgagtttttcgatattcatgctctggtactattttctcacatgctcatagggtaaatgccggccgtgtctcttcgtgtcccaggatatggcacttcctcgcctactggtgctataaggactgattcctatgcactaggcgatacggcacccaacatgcatcctgggaccgttcagttgactattccccttaaatctagcttagagatacagcttcctaagtctaagatttacccagttggtcctagggaccgtgaggttattaacgccgcctttcaaccgttacatgaccaaggaaagatgagctatataacgggacatactactacgggtttccctgtctttattatatagtatacgactcaccggcccaggcgcgaacccgcgtttaagtttttctaccaatggtacgtccgacgcgaacatcgcggccggatatgcgtcgtttcgcatcggggccaggaaatgttcatatcgctatcatgggtttctgcaatagcgtaccctacgttcagcggcaaatggacctactcttgaaagagtttgtggagttctgccgtgcgtacctcgaaaatcgggattggggcaagaaaggaggtgttcgagaaactcctgtcattttggggaaggattaagccctactattgattcgttttttggagggaaaggtgaaggaagcgatgctattcaaaaacgttgaaaagacctcctgtaggcacaagacattccgaatacaaaatagataacactgtcgaaagcatagtttcgaatttagaataaatcaaccatatagaaccagcctgcttagtttttgagcatagtcacgtacaagatgcgccaatatagaagccaactttgcttcactagctcagtgtcttgactacaccggtattcttctcattggagaagtaatcgagccgggccagatcctaccggactctcgggcatctgcttctctgctcagcctgtgcatgcatacggtcggcatttcatccaattaccgggcagactcggcagcctactgatagtggcggtgaattgcaggcccgcatctccccaggttggccatgcatgaagcatattcagactatatcctaatctcaagccagtgatagacccgctagtctcattcctgctagtacccgctttccggggtcaaattgctctgacggttttaagcttggaacgaaccagaacaatgattgtttgaaacgaaggttgatttactacagctagagattcaactgacccgaggattaggatgtgcggaatagttaatggagatgaggatagtctgttatactaggatctctgtgcgtcaagctgtccatgcaggatcgatcaaaaccaagtttctatcctcgagcaagccatcgaggagataatatgccgatgcagctgtgatatgaatatctaatattagccaaacactttagactcctatagaacggtgtatatttcctatcttggacgctaagaccgggaccatgatgttccggtcacatttgaccaaacaagtcaagtcgaccatatcaatgtctgttgcttacggagcacacgctgtcttattttgtcatgcaaatgttgtccatctcctcaattcaaaagcctccgcggtaataataacatcaatatcacgaccccagccccagccccttagacccaccacagtatatcccttcccatctcggccgcccacgcaagctcaatgtgtcaccgccaagccaacaaacaacataaacctcagcggctgcaccaccccttacaagtgcaatgcgaagtataatgcgaagcggctggtgacattgccagccgcttactagcagctctattcaagtcacatcggggcccagattcttgtgtctgtcctaacgagtcaagttgcacaggtctgcttgatctcactatcaatgacctcactcagtgtagccttgtggatatttgtctacattaatataacaggaggcaaaacagcccctccgggtcatcttaaatcttaactagtagaacatcatcggagtatagtagctactcggaggctacgtcgcgagcaatccgaatgacaagactctccagccctcatccatccaatcagtgcagatcaatcccacagctacccctgtagatcccccaatggccctgtttcaggcgagaacatgatagatcttcgcgctggtgcgtggcttgtgtcattggtactccacgcccgagccaactaaccaggtataagacattgacggcgcctgattgatatacattcgacttaattttgctttcgttgtgatattaaatacccattcaatcttcaatcttcactttcatttttacttttaacttttagcttgagtacttactgctattctcacgtatgttcgttctgtcttatcttacaccgtttcttgcccttgcgtccgtctaaagcatactgttctattattatactcggctcggtcgctaatttatttgatcttgtcttactccagatccatttctgaatcttccaacttcacaatacgaaatgcgcgcttcagttatcatcctcggcttcctcgctactcttaccgtcgcgctgcctgaagcataccccaaggctgcgatcgcgtgtcaatcggtgagtcttcaatagcaatatggcaaatacagacaattcctaatgttattaggataccatggtctgcatagctgcgaactgtgccgctgagggatgttgctgtgagggacttacgtgcggatctaatggggtaagtacatagctaccgagcttgatggattatcgagcgtgatttgttgattcaatgctaatgaatgatagacttgcacgccactataagatgttttggagttacaatctgataaagggatgggcgcaaccacgcctttttgagttggcatgagaatgcgactgtgctcaatgctctcacttgtatttatctatttgttaatagtatataattcgaatcaaagattctcaatcctcattgctagtcccatataacataaaacaggagtggtagctttagtcgatgcatctatcgtcctcatggctcagacttagaatggcacatcactcgtgaagattcaaacgaaaccaacaaaccctcggcaaacattccacagacgagagccccatcttcgaccatatctcaaacccaatccccacagcaagtaatccaagccccactcaattcatttcaactccccagcctcaagccggcgttgcacacggcgccagggccgagtctcatcatcatctcgtttccttttcgtctgatcttcattggcactcagctgtctgcctctaacaagaaacccaaccgaagcgcccactatcacaaccgccaaaagtaggatgataatagcggctgcggctggtagcagaaagtagtagaatagcttgataccaccgatgacgaggatcatggttacccatattgggcgcaggaggatgggccattcgttgaaggctgagccgaagaggtcttcgcctatttgttccattttggtatatggtgagatagtgaaggcggtttgatttttttggtttggatttggttgtctcgttcgagatagaaaggagaggagtatggtaacagctcagcatggagaaagatgaagtctttagtcgacgcctgaacttgtcgttgtcgttgtcgtccgttcaaggctggaaagaacccggtccaggaaagtcaggacccagatggccgctttcctattcgggaagtatagctttttcactacctaaccagaaccagaaccaggtacgtaggtgttactctgcaccacatccgcagaattatctcccaaatgcatttccttcaaagcatccaacctcctcctcctagcaagaaccatctcggcaagaagctcaatctcgatctcgagacgcttttctaggtcgatggtatcaccggggatattcccagctaccgggggagcagtaatttgttccgcatctgactccctctgttcccgctccttcttctccttctccttctccttttctcgcttcgctttactctcctcagagttcatatcccatccaaatagtgcggcgagtatagcgaagaggaggaaggcgagaatgaagattatggctattgccacggttaccgggatgaggaagtagattaatgttttgaagaatccgctgatgatggatgttgttattaggagcgggcgcatgtagaagggttcgcattcgaatgggaattggcatggcatggtggatttgggttgttttggtttttgttcggcacggaaggaagagtggtagtaagtttgttctgagggtttgtggtaaatggatgatatttctcatatcctcttctgacttggtttgggctgtatgatatgcactgccccaattgtcgggcgcggttgcatgatgtcagtgcacgacgtgttgcatgacaagccgaggtctgaatggaggaaagggtggcagggcagatgaagacaaggatatcaagtgttgagatcgacagaaatacactacatatttcctacactacagaattaccagatcaaaactcgtaagaaggcataaatgcaatatacacaggactaataacaataaacagcaaagagatcaggtgcaaggtcagtagacaacgtcaaataaaagatgtatctaccagagtcaagtttaaaataaaatccaagaaaggaagaaagggccgatcgtcgtccgtagacacaccaagccgagaaagggaaaactcctagtcctcctgtacaagttcgtgtgaactaaaacaaaattcaaaaatccatcagagacatggcgcttagaagacggaagagcaaccccagtgctgctcaacgttgaactcgccggcgctcttccaggtgtcgtcagagaaggagaagaagatggacttggagccgacgctggcggcgatggacttgatggcagtggcctgctcagagacaccggggacggcggcgccgttggagtcaccggcgttgggccagccggtctcgaggttgatgacgtcctttccaccgcagatctcctcgagctcctcgaactcgctcttggtgaactcaccggcctgggcggcggtgacatcggcgttgaagaaggggtggatgttggcaccgacgatgtcgacggcgctgcagagagtggcagagccgtactgctgccagacgttgatgggctcggtggtggtgaccagaccggtgtagccggcggccttgaagctagcggcggaggactcgatgaaggaggccagggtggcagcgtcgacgtatccggactggatggcctcgttaccgacaacgatcagctcgaccatggaccactcggcccaggcgatgatctcggtgacctgctccttggcggcggagacaccggagccgtcaatgtagacacccatgatgatgttgatgccgagggacttgcaggcctcgccgatgtactccagaccgctgcagtcagtggagtagacacggaccaggttgaagcccttgctcttgatggtggtgaggtcggagagaacggcggccttggtcttgcagtcaccagcggcggtgtagggggagtaagtcataccgtactggccctcaccgaggacggtggggacaccagtggccttggcggtggaggaggaggaggcagagctggaggtggagctggaggagctgacaacggaagcagtgctggtgctgacgggaacaacaggagcgacagtgctggtgctgacgacggggacggcagtggtagcggcagcggcagtggtaggcacaacggcggcggtggtcgaggccagggtgttggtggcagcagggcagatgtaggtgtaatcagtgcgggtcacggtgacggtggtctcatcctgagtgtaggtaccggggacaatggtctggggggtagggtagaccagaacggtgctggtaggcacagaggtggtggtagggggcacaatggtgtaggtaccagccgaggggcagatgtaggtggtggtctcaatcacgctggtcacggtgctgccggagggcttgacggtggcataggggcaggtgactgtagtggcagtctcgacaatggtggtaacaccaccgtaggtgacggtaccgctggggacctcagtggaggtggcaccgcagacggtggtggtgtcccagacggtgatggtggtggccgggatggtgtagacaccagtggtggagaaggtgctcacaccgggagtgggcagcacaacggcaggggtgctagcgacgctggaggtagcgaaggtgctaacagctggcaccgaggacgaagcagactctgcgccaacaccagagacggtgacggtcaaagtgctggtgctggtggattgcacagtgctggtgtgagtgctggtctcggggatagcgatgggagtagaggaggaagagggaatagcaacagtctcagcagggaccgaggaagtagcgggaacagcctcgacgggaacagaggtcgatgtagcgggaacaacagactcgtcgaccagggtagcggagccgtagacggtgataaccttggtggtgcaaccacaggtctgctcggcctcagcaggggcagaggaccaggcgctgacagcagcctcgcgacgctggtggaaagcatcatggcgacggtgaacgccatcggccatggcagagccgaccaaggcggcggcgaaaatagctcccttcattatggatggataatacagccacgcaaaaagaatgaatgcccgctgaacgagtgaagcggtggtcaatagaatcgaaacgtggatgagaaggtgaaaagagagtgatgggggggcaagcaaggccttttgatggagaaatggttaccgggggagagttagggggaagggaaaaggagaaagaatacagaggtatacacgcagatacacgcacatacacacgtacagctccaccgatcgtgaattggcaatttaatttcctcgaattacccctggccgagtctagatgtgattagattgaggtgattggtttgtttaggtattggtataacatacatctaacttacatatgcaggtactataaacagtcagatcgttatattctcgcccaacggttacaacatatccagtgtctatgtttatgtctattctatgtctattctatgtctctaactattctatattctacgtcccgtattcgtattactattattatccagcacggatcatacatcgccctccccttttcatctaagccttcggccccagcgtcgaaaacagtgtctcacacccagaatagtcttctccttaccgctgtgagggtccaacttcctttggccacattataccgggtttcatatatctgcccgatcatgcaaggccttgtaccctgtggctttatcttgctggcaagcccgagccctccacgatccaagaattagggcatctggaattctcaattggcagattaaaaccccaaacccaaagaaaacagaaaagtctcttcccgcgccatgtggggccaactgtcatagcgtccccggccagtcccagaaaggaaaggtggcagctaaattggggtcggtgctggaccctgattggctgtggtactacatctaatttccgccctgccgatctttaccaccaaaaccaccgtaccggtattattaatcttacgattaccggccagatacagtgtatattattgctttttcctaattcggactccgttgtctcggattacacggagtcgacgaagattctcgaatgtcttatactctccatacctatactaatacaactactcatcctcatcctcttggaaaacacatgcgctgtaattgcgctggcccccctgtcgatctccaacgatatacacactcatgaacaggccgatcacccggtctaaccaaagtcaaaaacagatgataaacggggcaggaagcttgaattgctctattaatgagtcgcgccgaataggaaggaccggtcaacgagccaccttctattcagagcatagcccttgtctagtgggatcgtggaatcaagaaataacactgtagcctgatccgaggcaaccgatatcttaggatgtacgcgtacaatcaagcagtaggcatgttgtagctatatgttgtatagcgacaatcctaccatccctgtactgagtgttgaccacaaggaggacgaggttggatcctcgatctcttcgactggcgatcacgactcggggtagatcacacggatggggacaaagggtgtcggagattaccgtattctatagatacgtagcgtgactgatttaattgcactcactaaatagtctgatctatctatgttgtagctgatttatggatgttactattgactcaagagttgggcaactagaatgatgttaaccctgtattgtatcgcctctgccacgtttagtccatacacaaaacaacaaaacaactcaagccaactcaacgatccagaccgccagaatcttggccaactgacaattccaatgataaatgaaggccaagataatagcggatctgggcgtgggcaatttactttaggtcaaggcttggcaataccctggttgaggttattcagggggcttccaggggtcggcgtgcggccgaggactgcgattcgtgcagagactggggtggcggttctcgactccgttcagccttgttattggttttctgtttctgtttcatatagaacgttccaaggtctagagtaacggtgtgggtttatgttccggggaagtttctgctttttggttttccctgcatatgacttgtttcttttgggacgtgtcggattagggctatttattttacgctggcattccggatgttctatacaggccacatgggatggcgtttggaatgtgtcgctttatctttatttctaggtcatttcattatctgatgtggtttctatcaacggcttaatcccgagttcagaatatatttgtttgcactttgaagtaattgacatattccgtatgccttgcaggatatatatctcagaacatcaagaaatgacaccatgatcagggtccacagggtccaatatccttgccagaataaaccataggcaacctgaatgtatttgactcaaactcaggctctttcgggccttccagtcacttttgtccgtctctcgtacgagaagcgaaggagggggaggaagataatcgtgtttctgttctacattctttcttagacaagtgtcgcttgtatctagattgcctatcacctacctcatctttgagatgtacgtcgacttcgtatggacaatttgcatggaataatagacgtcgaggtacaggggtcgatagaagaatgacatattagaaagtggctagatttgggagaggagtttggggaatataataaactgacgtcttcaagggctaacctgctaagatgttctcaaccattcattgtacttgtgggcagtgtgtctgagcgatgtgctacatattgattcgtagcgtggaaggttgtctcggtcgtagagaagcccgaaggggtaggatgcatagatgcatagaggaatcaacggcgatagtaaagaagatagaacattgtgtgcatagcgttgtcatatgctaggaatatacggagtagagtgagtgctctaaatatgtatctggtgtactcggtaggtcccgaagtgaacctggatgtacatcacaacaacagtacatccaaaataaagagataagactgtcacacaaaacgaaaagtaacacaatgcaagacgtagatatctgagtcttgttaaatcagagcaaagatagaaaaggcagaacttgtcgctgccgaatctgaccatcaccgtgccacccgatcatgccacacaccgtaccacctcaccaccaccatcatcaccaccaccaccatcaccagtatcttccaatcatccgacctcgaataataatcggcagttcactctccacaaatcctaattttaaccccagaaacaggaacggagaaacccgcctaatacatcgcaccacatccgacgtcacgactcccaaccaaccacagccagggttatcccggataaactcactcccagggaaaggtcacgctatacagaacatgccccaggaacggcgaacggccagtcccgccatccagcctctcggaaccgtgacggtttgatgctgtcaggccacttgctgtggctttgcatgatgagatgggagaggtggcaggatgtatataaggctggatgttacacgagtttacctattcttcatcacacaagacattccattcatacattacctacttcggttaccttgatacttgatacttgacttctatacatctatctacatctacatccatctacaacagccaccatgcaaccaaccgaccaaaccaagacaaaggccaagacagccgctgccaaagccaaagccgctgaaagcgagcacgcccgtctgcagaatgactacggcgcagactactgggtccgcaatggccaagagcatcgagtatgtacaccactaccaccgccactaccaattccgatccattgctaacatccaaaagcgtgctactggtggacgaggcctcttcgccggtctacaagacgtgaagcactacaacgtcgaccacggctgggctcgtcgcaagtctgagactgagcagcctgggattctggggtctatttggagtcggtatgttttacttcttgtctatatttgggtttgggttggggttagtgctgactttattgataggatcactggactttgatttggactcgctttgctggttccgtttgattcgattctagactttgtcttttctgacatagactaaaaggggattgggttaagattgagatgattgatgtttgcttttggagttggattttttgattctgtttgtttgagcattgttttgttttatactatatctttcttgatataggagttctggtggaagagctggtttctttaatttctttttgatatgtttatgctcttatacatatcgtgtttggatatatttaatatatcctatagacaatgacatgcaataagcttattcgatataatggttccttctggtctatgtaagcgagtaagcagaaatgcaatcaattgtacattagtaaatatacactcgagatcaacagtcaatactctagaaataccataacggtctacatccatgatcacaggaaaacgtaatattccaagtactatatatatacataaccgctaatagatataccaaacgccctcctagcgtctcaattttagaaatgaggtatcaacacaaccaatctactcccaagagtcaatcttcatggtacccttctcctgcagattcttgtgcatgttgaaagcctggaagagcatatgaggctcatgacccatacccttacgcagacactcgaactccgcacggtcaaggtaatccgtcaggataggagtgtagtcagggtgcgagcagtgcttgatgataacacgggcacgctcacgaggagacaaaccacgaacatcagcaagaccctgctcggtcacgataacgtcaagatcgtgctcggtctggtcgatgtgcgtggcgaacggaacgatacagctgacaccggtgggatcggtcttggtgggacgcgcggacggggtgtgcatgatactgtacttggagttgcgcaggaaatcggcggagccgccgaggccgttgagcatgcgcgagcccatcacgcaggtgctgttggcgtgcgcgtagatgtcgacttcgacgggcgtgttcatgccgatgcagccgagacgacggatgatctcgggggagttggagacttgctgcgagcgcaggaggatcttgggcgcgtagcggtcccagttggcgtagaagcgcttgaagccgtcgggggacaggcggatggaggtcgcggtggcgaagtcgaggttgccgctatcgaagaggtcgaggaaggcatcttgcaggacttcggtccacacggttaggttcttgaagtcagcgccgcccttgctgagaccgcctacgacggcgttggcgatgttgccgatgccggactggatggggagcaggttggttgggagacggccgtgcttgacctcatgctggaggaactcgatcaggttcgaggcgatggcttgcgagccttcgtcttcgggggagttgtgcgtggtcttgtcggcatagtcggactcgacgatggccacaaccttctccgggtcgacggggatgtaggttgttccgatgcggtcgtcgggacgggtgacgaggtagggcttgcggaagggggggaggtcggtgccggtgatatcgtgcagaccctcgaaggagggcatggcggtgttgacctcgatgatgaccttctcggccatctggatcagctcgggagaagcaccgacggaagcaccggggatgatgccaccgtcctcggtgatggcagtagcctcaatgatagccacgtcgatagtgggcttgggcttgttcaaagtgtaccaaccctgggaaattgttagcggtgaatatttttctccggtaacgcaaaactcacatagaccaaatccgaagggaacatgctcagatgcttatcgaagaacttgatgtggccggtgttgattcccttggcgatttcctttccaacctggtgagggctgcggcgctcaatcatgttcaagtgcgcccaacggctctcggtgtctgcgccggcggaggcaccgacaaacaggttgtacttcagctttccctcgaggctgttcgtctggacgtgatcggccagcgcattggggatcatcctggatcgggttagcgttgccctcgcttactatagtatcgtcgcggtacatacttgggataaccgacaccggtgaatccggaccaaccaatgtacgtgccattggggaagtggtgaatcagatcctcggctttggcgagcttcttcagatacgatgggcgccgtacacggctcttcaacaaggccgaagcagacatgatgtaggaggggagagtgtcaaaaatgttggaaggaagaggaagaaaggggatctcggggtataagtaatttcgttaaccccacgggcagaggtctccacacaggaatgcaaggccgatagctccgggagaatggatgttttaaaaatttagtcttggactggctatatgtatggactcgggatattagacatggatattggacattgaatactgcatagcttattagtatttaagcaccggcatccaatcgttatatatccttcttcttctattaaatttgccttggaatcgtttaatttgcaattcttcgcattcgactaaatcagagtgacgtcacgtccctcattcggctttggttcggccggtcatcgttcggcttttactaagcggcttctctgctgttcccctgcatatggagtacggagatctataattaagagagagctctttcagacgacatgctatccttccaatatattcaacataaacacacacacacacacccccatacacaacagaaaaatcatatctcggaacagataccccgaacttcccccgatccaccctcgggacagaatcggttatgcgggctcggccacacggagatttcagattgcataacctccgtaatggctcatgcatttcacaccattcggcatatatagccgctagcgatgccgattattccgatttagtaacagaagccgatgatctggaggaatggccctttttcataccccggaagttcgacggaatcccgcattagggcatggcgcacattggggaatgtgcgatatcgtacgacgcgattcttattttgttcgagctttggcgttttgtgaggctacggctcggagtacggggactccgtaactataagctcggctagctgttagcctaatgcgggatagttcgacgttgttaaccacacggttaactatttacaatataaaattgattaaggggaagaccttccctttattgcttgatgcctaattacttagccgacggttcttatatcggcatctgttggattaccctttatggtgaaaccgagatatgatagaattagtgataaatcctcattaatacatatcagaataaagccaatctctccatggccattatttcatttgtgagaataaagtaagagatacttgaagagaaaatagagatacaaatacaaactacggaaacccgtgcaaaaaaagaaaaacattcgtcgcaatttcctcatcgtgtacgccatcctcccctcccacaatcaacaataatgcatgccaatccccccgcttcgcaaggggactgacccgtcgtaaaagttaccaacgcaacaccgtctacgcctctgtaggctcggcatccgtcatctcaacatccgccgccttctcctccgcattagcgggggccgcggagccggcgccagacccagacgcagatccctcacgggccgcgggactaccagagagggtcccgtcgacccaagagcggaaccgctggttgctctcgtctacctggtccttgctgaggccgcgggcccaggccgggttattcacgaacttctccacgaagcggtcatggcgcttttcgtgaagcgcggccttctccttggcgagttcgtcggcctgggccttgatggcctcagcgtcggcatccttttccgggatgggcgcgttggagcgccagaaccagtcgtaggtgggcggctggtacagcatcgtgtagttgttggcacagatgcggatggtcaagccgtcgtggtgctgcaggctgcggtagtaccgctcgtactcctcatcttcctcgagcttcggaggaaggttgcgcttcagcaggggcatgcgcatcttcgagaactgcacgccttcggtggggtcgcgcatcgagtaggcggtcacatagtaggaccagcgctcttctggagtgagctcctcgttgtcaagggttgcgtcttcgctggtcatcacttggacggtgacacggcggtcggcggggtactgggattggttagttatgtcagggcatctttgaaattagaactcacgaaagtaatgcgatagatatctccatccttgaccagtcgctccacttgtttgcggtattggatctcctggtggtgggtagtctcctccttctcccgttccttgaagaaaagattgataatatcggagctgcgatcgcgagagtcgccggtgaagatagatgccacaaacttggaaatcgaggagaagatacgttccaagttgtagagcaggtatccgctctggatgtagaagcgacgtagggtctcttcgaggtgaacctgatcgatatcgcccttaataacctcctcgcacatgcgcacgatctgcttgtaaaggttggctttgggatcgacatcatagaagaaatcactagggtatcgatcgatcaagcacaagtcatgggcagccttaggcagaacaccgcgtcggacttgttcgcgggccgtgtcctcttgctccttgatgcgcaggagacgcgagtaaaggatctcaaaagtacgcaagaagcagaagatgttcaggttgcagtacatatggtgctccttcttcttgtacttctcgttcagtgtgtattcatgctcaaggttgaagttgccctttccgggatgctccatccaccgcagttcagccacgtcaaatgattcctcggaatcggagacggtggatggaacctgggcagcaggttcgtcatggttgttcacaccatcctctttaggcttctcggtctggcgtccgcgttcaagggcatcgcgcagaagatccagcttctgcaggtccacccccttgcggctcccattggacgcatcgtcattggcataagtatcatcgtcctcattgatggcgtggtagacttcgtccatgtacaagttgaaagtgtaacggtccaggccgaagaaagtaggaatgaaatcccggataaagttcatgagccgctgaggatcagcgccaaagccattggtgttgcggtcaaagtacaagaaaagcaagtacacagaatccagaaggacctgagtatcgctgaacttatactcagcctggaacttgggtgggacgcggccactcttgcgactagcctgtccatcctcaaacttagtctgtatgtcttgctggatgttcttggcgacgaagagcttcttgtcggtttgcttggtggcgatggcttggtggtcaagactgcgccagtatgctcgctgcatctgttcgcgccagaccttgtcccactcgcgctggcatgccttccattcctcgagcttctgcttcaagcggtaaagaacaataggaaggacgtggcatggacggaggaacatgtctcggatgactttctcgccgcgttgacggtcgtaaatcttcttgatgacacgctggtaaattgcctcgctttggccaccgagaccttgtggcaatttgaaggacatgcgttccgcatcattcatgtaaaggaattgctggcaaatgggctcaatcagctggatggtgcgggtgcaagcctcgatgtggtgatcgtagtcgtggcgatcttcctcaatgcgatgcaaagcatcttcatactggttcttgcggtgcgcaacaaagccagaatcttccgaagcccaggtgggatgtgaggcccagtcatcattaagaacaccgttgcaaagcggatcgcgtccactgcagggcttttggcgttcacgcttaggaaggagtcggtaactcggtcccagagaccggcagtgagccaggttgacgatacctgtttccgggttcgccttggggtcgatgattttatcctcagcctcttcggcactcatgaaacgtctgaaccagttcatgagctcagcattggacccgatgtatccctcggctctcttgaccaggatgtgacgatcgaggagatccgtggtgtacaggttgcaaagcttgaggaagtcgctgaacacttgcttgttcgcgatgaacttcttcacgcggtcaaagaacgcgatttcttcctggctgggagtcatggagaccgagggaggaagaggctctgggagagcaggaatcaaagtgggagagacatttgccatgtcgacagagggctttccatggtgatactttggtctcttgctggcgttgccgaactgcgaattctgacctcggttggcctcagacaagcgagcagcttcagcaccggcaggccccgagatagagccaacaccacctgggccaccacgacgcttcttgctctccttggggtcctttacattaaactggcccagaggaggcatcttgacgtcacggttaggagtctgggaggtgaaacctgcaggttcgccgcggaggttgctaagaggagcttgttcttcggcttggcgctgcgcagctacttgtttggcatgcgcggcagattccggcaagaactgtttgaagtcctccaaaagatccggagcagtgttgaacaactgagtaacctgtccatagacatcctggataggttttgactcccgctggtaagtctgaagtatctcgaggaactgcttgtagatctccggcgcacttgaaaagcggttcttgatcttgttcacgtagctgatggcgtggttgaactccacgggaccacgcttgttcagatcctgagcaccctggagcataccagttccgacgccagccaggttgttcatcggctgggtgagagagttctgtccagaacccatgagggacgacctaccaagtccagcagacgctgcggaggcagcgccttgcagctgtgccactccacggtggtcttgctgatgagtcatggcggaagcagcttgctgctcctgttgggtagggtagccatagtggtgctcctgagcggggcccggtccatcctgctggtacatgccgcccatcatcctcgagccaggagagtaggaaccagatgtggggccctgctgatcctgctgctggccttgccagccaggtcgagtttggtcacgatagaaatcggaccgaccatgcggatcaccggaggggggtgcattggtaatcgtctcaaagggacgtcctgcgcgtggcatgctcagtgtgtttgtaccagacggggttgtgacccgaatcgcatcagggttgtcttcggtaccgcactcaatgcggtagccggggggcaaaaaggtattgaatccttgaataagagcaggatgaccattgaagagtgtcgaaacacgttgaatcacaccaggcgtatcaatagcctggctcttgaaatccttcatgatatccaagaaacggttgtaaacatctggttgatcaacaaaccgcaccttgacctggtcgaggtagctgagagcatcgttgagaatcggttgctggccctgggcaagagctgcaacatttcctggaatttgctgaccggcgttgttgtacgttatcataggctgtcctggtggaccggggtgttgcatgtacgagcgaggtgtgccatcgccgtgttgcatttgaggaccgaacaagccagccgcagactgaggtccgccctggtggctgttctgcgggtttccgccaagagtcgagaggagtccgcccgggccatgaatggagttggggactttattggccacgggttgatggagaggaatcgagccagtgtggctctggacagggtggtggttttggtcgcggcgatctagttgccgctcaatttgttcgcggtggtcgcgctcgcgctcacgatgagccatttcttcgtggcgctgacgctccatgatctcgcgctccctggagtcccgctcccgctcgcgattgagctggggagaagcgtgttgcatggcttgaccaattccgggaagtgaatggccgctgttatgcgacggacctgcttggtgctggccgtacgcggaaggttggtgcggatttccgtgggtctggcttaattctgccagtccaggaagagaatggccacccgactgactagggtggtagggtcctgtaatcgaatgattgttagttaaaacgtttttatcattggttttccgtagaaatcatagttcagaggcactcaccacctggaggggggagtactgggcccgagggctgcgaggcttggccttgctgagagggattttgactgttgaagcgcaagaatatcggattagtctttgatctcaagccacctatagaagtgctcgtacctgaatgaccccaggggccgcggctgctggttcatctgatccaagccaggatgcgacggcggcccaccggaggagtgccagttatcgtttccagaattcatgatgtatgcacgaactccggtgtgagagaagtagaaaggtaggtttggcggataagaagggtcgagaggggagaaaaagtaacagggtctgctaatcagctagagctcgtggtctcgtcggtaggaatcgactggcaacgctcaggttgcagtagggtcacagcatgacccggagtcttgcagattagaagacagaaaccgactccacgcagcaagaaagaaccggcagagaagtatgatagacaaggaggagacacacactggggtgatggaattgcgcgcgaccgatcgcgggctcctgtggaggctttcctctccggggctagcctcttctggcttagtaggtgcttatcggagatttgattatccgatgggtattcagaattcaattcattacggtatctattgtatctattgtatccattggcgggatttccgtcaatgggaggcggtacattggtcacgcgtggtattgtgcgataggtcaatttcagtccgccttcgtcatcgcccgccattgccggcagaaaaacaatggctgacattgagtgggcaggtgaacaaatgtgaatagcatgagtcatgaatagatcaatgacttgaatagaactgttattgttcattgtatattctattgtagcaagctgcataatgagactcgttctgaaggctggggtacctctcgcttgttaagcctcggaaaggggcggaggataagggctggctaacaatgcgtggccttctttcagtactttattcaggcgaccaagcaaaacatctaaaccatatacttggaaatagggaaagacttaacatctcaacactagttgactaccatatctatagtctgtactaactatggaaatggcctcaaacaggcatgacattctctatcatgagttggccaccatacaacgcctttggcaaccccacagcaatagcaggaaacgagtaaaaggggacataggtaagaaagactaggtctccaagactcagacagatgagttccacaataagaacagagatagggaaggggagggaggatagtcctgtgattatggaacctgtggcttgctgtcattattttctggttttcattcttcatatcttgcctgttcaccaaggccctccagccacccgatccaaacccagatgcgcctgtccatggaaaatgataatggcctcgtgacggtacggacttggtccgattaaagagcggagaagacaaagagctatatcgcaattagcattgtaaggtttagatagaggtaatactcacattgtttgtcgccgcaattgcaatgctgtcttcgaagggatgccagctcatgtgcaagatctttttgttgaagtcgatctggtcggcatcggtctccttcttcatgcgactaccggggccggcagggctgccggatcgcgaaccagccttctttccgttacccttgctcatcggcgtcggtacaccaaccttctttgccttgaatgccgacttgtctgcctggagcacaatctccgtatccttttgttcttctgtagggtaaatcatgaagttgttgttgtaactgccggtcataacgttctccgcatcgccagagaagaccacctcgaacttgtcaaagatgctatcgttctcgtacgtatcacagaggcgagggcgcaggtgctcgtggatggggatggtcttgattggctggcgttccatgttgacatcccaaatcttcactgtcaagtagtccctcgacacaatgtaccgcccgtcgttggagaatcgcacatcggagatggaggagataatctcggagaagaaggaacgggacgaggcatcctcttcttgttcgaactctgcaaacagtcagtaaatgtcattggcgccattccagctgtacatacgcttggcgtgttcgtcacacaacgccctttgtcgcatatccgcaagcttgattgtgcccttggagctggcatacatgaaccagttacagctaaccgggtggaactcggccgcagtgatgacctctgtgagttcctccatattagctggcttgatatccacgatgttgaagctctgatcttggatgttgagattccataggttcacccgcaggtcgtcactgctgataaaggtttcaccatcgctgttaacggagatgctatttatatgatacgcgtgagcgttggcgtatgttctccgcggaacggcagcgacaaccgtgtcatggtgtgtcagacgaggcagcttgagcgcagaggggtccttgaaggatatgcggggtgcgcgagccatacccccaccaccgacaggattcgcgggggtgagttcactcgataagttgttctcggcgaccactttcagcgacttgtcgaagaccttccaaagctttatcgtcttgtcgttcgtcgaaaggaggaaatgggatgcattctgtcgtcggcaccattttatcttgttgatcttctcttcgatctctagcgacttgagataatcgaactctggctcgtgtgactggaactctgtgtggaacttatactcgcaggtttttttctgtattgtttagtggttagccgcaagacaagaaaaccttgatgacggaggggtggctaccgtctcatttcgctcaaacaacaccacccttcctcccttgtcaccagtggccagatagttaccggtatggtcaaattcgacggttgagatgatgtcggctgcatagcgcgagtcagtcgatgcattctgtagaaaatgaccaggttcggccgagaagtgcgagggaggccaaataccttctgtaatatcttctacatcacctttatcgccgaagcatctaatatcaagttagctatcattcaatgactgtgattggtcgatggcgctggacaaagggaagaaaaatggaaaccataggaccagaacctttgacaggagtgagccgggcaaacttactgtgtgaacttccaggtaggtgtgcctggatctctgtctaccattttcacgttctagctagcccttgaacgcgacaagggcaaggaccaagataggagggacgggaaatgcgggttggcaagtgcctctgaaagctctattgtcgatgcaaagaaaccctcggattgaagcgatgtagacgcgatagccgacaagaaagaatccggtcgggtgggaagaacgattggatacggagatggagagaacagtcggtcaccggagatggtgtgcgaggggtttggagggcggatagcggtaaggcgaaaagaggggcagagggggggaagagcaacgatccaagttggaaagacgagctgaagaagagctgttgccgaatgaaatgggcaacgtcgctggatgatagaacacaatgaatgtgttatgagtggacccgcagcgcttgagaagggataagagaaaagtttctattgagcggtcttgagttagaacggaactccgtaaaagatatatcaaacgctccatcggttgtggggatgggggttgcgtacctgatctggagcgatgaaggaaagacaaaagaagttgtcaggtgaagttgcctgagtcgaggcggtggtggggagagagttcgttacgagataccagctgacggttcttggcccgtcaatatcaacagattgtggtttcgccaaagatgaaaaaatataaacttgattagaagattgaatattctatcttcaccagaattcaggtcgggctgcaacatgctgacatcaacactgttggcgactgcaacatggcccgttgcgcccctccccggccttgcaacccgtatacgactacgcctgggggtagaggtggaatatcaattgaaatcgtgagatataatctagctaattgcttggatcgagcgagtctacagcagtcaattctttatttcatcgtctatatgcccgaagctgtactatgcgcctctgtcgtcatccttgaggcccaagcagtctccgctaaattaagcattggcatatatcatatgctatctatgttgtgaagagatgcgatactccatcgaattgaaactatttattcaggtccggggtatccatttgagaactcagctgggtatactcggttcttctggaagtatatatttgactgccgagccctgtcgtttctactctacctaagccctaattaagatcctataactgaaaagactctatttaccttattaactgatattaactcttatataacatcccatctccctattacagcctataggatcctacattctaatcccactcaccatcacatgcttccctccaatatccggcccaaagcatattaagccgaacacgccgacaaccttggaatcatctcaaatttcaacctcacttaatcctacacctccaacccataatccctaatcccaaaaccaaacaccaaagccatgagcaacccagagaacatgcggggcaatcccaactccaaaccccaaaactccaataccccagcctcagccccagccccagccccatcatcctcaacctcaacctcaaacacatcccaaccccctccctcccccgcgcccccctcgctagcaacccgcatccaaacctccgcaacaggcctagcaaaaagcgccttccagccaagccccgacctagcgcagaccctagcatcgagcacaagcagcaaacaagccggaccgccctctctcccaagcacacagacaagcagggatctatccacaaccacaccacagcatggaggccccagttccagttccggctctgcagcacaatccttccgcgaaccggatacatatacctcgacgggtggattcggtctaccggcattgacagaagacgagttccagaacacatacgcatacgagcgagaaacaggccttctaggcacaaccatgactccaaccacaaccacatatacaaacacaaccgacactacccacgaagacctccaaacaaaaggaaaagcccgcgcccacgacccaacccagcaccagctcgaatccgtctggcagcgccaatcgcacgagccacacagccaggatacatatacatcgctgacatcgccggaagacgggtcagcggtcatctcgctgctctcggacgtaaccttcgatccgaatttcgaggaccccgcgacggtgccagatacagaggttgatattgctgctgcgccgggtccgctgtctgcggctgagcgagaggcgctggattcgttccggaaggggatggggctggatggggaggataaggggcgggtgggacggttaacgggtgcgagtctcgtgcctgatattgatgtttttttgagccagggacttggagggaatgtttcgacgtcggcttcgacttcccttcgtgatgcggttctgacgaatcttcctggtgcgggggattggattggcgttcaggataggtatcatgatgaggtttgggggtttttgcagcctgtgcttgaggatgcgagggctgagattgaggagaagggggagggattggggcctgcggaggatgggcctgctgtgagaaggttgaggatgattttgatgcatatgaaggggtgattgtatgtgtttgggatatggagtggagggttgggtgtatgttctagtgcttttgtagtagggatctttggtttttttcgatataccgtgtacatttaaatgtaaatattagagagggagtgagtatgtatttggctgtacaaagatgatgggtaaaacatagtttttggagcagacctaagccctgaacagagggactcaccacagctaccactacagtacaactacatcactcccaaacatatatattccaagaatatattccaaataagctatgtatgtatgttacacaagaaccaaagttgacccaagtaaaatcttgaatcccgaggactgcaaaagcaagcgtgtcaagccagcacaagaaacaacagaaagagaagaaacgggggtatgagagatcacacgctggaggatcatatttcatcggagagcggtcatcaaggagaagagacataaaggagaagcagggtttaatgtaaacctacaactccaagctgggggtctggcccttgacacgaccgatcacagtctgagcggcgtacttggggatgacctcgtcgtcgtgcagcatggcgaactcctcggtagcatcgcgacccatgaagttgtacagggcgtttgcgccgccggggtgctcgtcgacccagttggtgagatcgaggatgacgcccttgaccacgacccagaagtccttcttggtgttgtgctcggcgacttcatccatgctgtactccgtctcgggaaccttgaaggtcgcggggtcgggcttgggggctggggcctcggcgctggcggcaggtgcagcagcggggacagggagagcgggcaggctgccgccggtggcgccactgccccactcgacagagatcttgcctggggtgttggggtcgatgtggagagagagctggccgagacgctgggaggcggcgccgccgccgttgctgaggagcttctggaggaggtgctgggtggcggagtcgcctgcgacacggccgtagacgacacagccgaggagggaggaaccgccgagacggttggcgccgtggacgccaccggcgagctcaccgcaggcgtagaggccctcgaagggcttttcctcgctgttgaggacctgggcgtgctcgttgatctcgatgccgcccatggtgaagtgcagaacaggctccatgacagagacgtggaactcgtcgtcgagcttgaagggcatgttggcgaagaagcgcttgttccaggggtccttcttcttgccttcggcgatgaggttgtactcgtcgaaggtcttcttgagggctgcttcgccgcagccgatttcggcaacgagctcggcgccggtcatcttcttcatcaggccgcggccggtgtagtgacgggtgtggaaatccaggaccttggaggctttgctgttgaggacgaggcggatgggccacttgcccttttccttttcttcccacattttgccggagacgtagtcacggtgaccgagctcgtcggagaaccgctggccgtcgcagttgaggaggagaccaccttcaccccggagggcttcggcagccaggaacttgaacttggcgccggggtccttggggtcgacgagaccggtagggtggacctggaccttgtccatgtcgatgccgttggcgccaatggccatcagcatcttctggccgtcaccagtagcgtgagtaccgttggtagaggacagcccgtaggtgtcggggcggtacttcttgaggagagaagtctcactgaagtcagcggcgtaaccaccggtagcgagaatgacgacaccgtcggcgaccttcttctcgccgtcaacagtgtaggtaacgccggtgacattgttaccagacttgttgacggaggtgacgtcggccttcttgatgatctggacacgactgggctccttctcggcgagatcttccaatcgctgcatcagggcgtaggtaatggccataccggggaacttggcgtcatgaccgcggtgtgtgcgggggaaagtgtgtcctccgagacgggagacgagggtgaggtcgaggttgaagacatcctgcagccactcgacggcggcggcggacttgtaggtcaggaccttgatcaggtcgggacgggccttgtcacgggccgacttgagggtgtcatcgtagaactgcttgacgctgtcctggatgccgagatcgacctgggtgcgggtgagagcaccgttgataccggaagtggccttggtagagttaccaccgaagaacgcctgcttgtccagaaccaggacgttgccaccgttgaggtagacggtgtgtgcggcactgaggccagagactgggagggtcagctagggcagagaatgcggggaaaggaagcttacggccaccaccgaccacaattacttgaggtgcagccattatttatgtatagttaggataaagggaaatatggggaggaaaagaaagaggaaggagggaaaggatcttaaagaaaaggaccgggggaggtcagaagccgacggtctatcggccgaggcaggacatgggaggacgtggggagacaaaagatggggtacccgccggacgactaattggccaccgctggtttgttcgtattatctggggaagacgggatcacatgcgatatagggatggatgtgtttccaaggctattaggttgaagtctagaatgtcattttcatttcattttcacatgcgtcttggtgtcacattccagtcctttcaagggctgaaaaggaggaattggataggtccatagtcgacggaattagactattgcaactagaccggtgggttagaaacaaatacaataaatagacatcgaattccggcttcctcggtctttacagtaccaggtgccaacctcggaataacaatcgcggccgaagtatccgaattgtccacgggtggatggcatgatgaggagaaagtaccacttaagttgaatccttgcaagtgggcagacatgtaatccagctacacccatatatatcgtgtacagaggtgtataatacggactttatatccccgtcgatgtctgcgatatcaaatcgccagcccaggggccttggaaatggccagaaagaggcaaaagcagttgccggctgaggaacacgtggctgctgattggtggaatctcggtgtggggctgacctaatccggggatgggaaatgcctcggtggggccgatgacctcatggatccccgtgcgtcgattggtgtttttcgcttcaaatgccgaccttcttggtctgctgtatatacacttggagaggagcttcatcggtttacactccaccagaccttattctcgttgagctcaacattacatttgcctattgtgaatatccgctacggtcgctcgggtcaatacccaccgagaaaccatcaaacgggatctgtacgagacgagtgggctgttgggatataatggacacgccgatggatatggtgtactccgtacatattctaatgaatcaaaacgcttatggcagatccaaaaaaagcctaatccatccaggtaacactcttcgtaaccaagaactcattcaatccctcatcagtattgaaccggccccagccactattcttcacaccgccatggggaagagccggctcatcatggatcgtcatgctattaatatggaccgccctgcaaaagtcagcacagatccacccaaatccgaatctagatctgcaacaccaacatacccagattgaatgcgtctagccatcgccaagcccctccgcagatcctccgtgaacacagacgccgagagtccatacccacttccattcgcgagacggatcgcctcgtcctcgctgtcgaagggcatacacgccgcaacggacgcgaacgactcctcctgccacagcgccatgtcttccgtcacgccgcctaggacagcgggcgccatccgcactcccgagtcggtggggacgctgtccgcagacccggagatgaagtgtgcgcctgccgagacggcgctggcgatgagggcttcgacgcgggtcttggaggctgtgttgacgagcgtcggggggagggctgaggctgctgcgccggctgcgagggccttttgcagggcttctgtgaaggctgggaggatggaagtgtggacgaggattcgatcggttgccatgcagatctggccggactaacacggaaggagataggttagagacagatatagatatgcgacgtgcgacatatactcacattcaagaatgcacccgccaacactccctgcaccgcagtctgcaaatcagcatcccgacaaacaatcgagctattcttcccgcccagttccataagacaaggcttgagattctgaccgcaggcgcgcgcaatcttccgaccaacagctgtgctaccagtgaaatttatcttgcgcacggcctcgtgctcgatcatggcattgacgacctcgggggcatcctgcggggcgcagtgaatgatattcaaacagccagcgggaaggccagcatcctcaaaggcacggccgatagcccagtagcagcggggagttagctcagaagacttgaggactgtcgtattgccagctgcgagggcacaagccgcagagcgaatgccaaacacatagggcgcgttcctgtagaaccaataatataatcagcctgctatcaatagcattttccacacccgaggtcgatataggaaataaagttctcgggaaccagtacccaccacggcacaatccccagaataacacccatcgcctccttaaaaacaatcgcactctgaccctccgtctcgacgaccggcacactgccacatatcgacgtgatgcggctcgcgacttcgcggagcatgcgcacggcgagcgggacgacgaatcccgcagaggcgccgacgtccgcgcccatttcttgccgcatgtactcggcgttcatgttgaggcgggcttcgaggagatcggcggctttgaggaggatgtcgcgtctcacggttggtttggtctgcgaccatgaggggaaggcggcggaggcggcttcgacggcgcggattgcatcttggggtgttgcggccgaggcggtccagatggtcgtgttggtgtaggggcttgttactgggaaggtgttgggggttgtttcttcatggccgtttatgaggagggggacggtgaatccggggttggttgagtttggcatggtggggtacggggtagaggtagggtagagataggagtagtatgagtataggaggtatgcaggttgttgtaggagataatagaggcagtattaacctcggcatgaatatttttactcctttacatgcattgtattctatctcattccgcaacaattgaattcggagctgatcgcggacgatctttaggcaccgcgttgcctaatggaactattccgcgatatgcgaccattatttgatcgctttccaccgtctaatgctgatttttttatacagatttcgtctatactgtacacaaatcggcacattcaggggtatccagtgatcgacaagatatgaggtaactgaagattgtgggattcaggtccactgcgcgcaattgggcttggaagagcgccctaaccagctatctgaagaacccactccggtgtggcctgtcttcataggatgtgcatttaccccgccaccttctttattcggatgcgttcgcagtagcgtgtcaagttaaacttcgcctcggctgtttaatagcgcggattttcaacgctattgactcgggatctacattgccagtttaaccgagacttgggagagaagtgaattgtgggtgagaccatagtggcgtccggatggcttttcagtctgtggaggtcatacatgaatatgtatgcagtacggagacggagtgtgcacatacagatccatgaggatatatggagtaggatccaagtgcgaatatggatacatagtctaatggcaatagtccaatagttgatccttgcaaggttgcaatcggctcaagttcgcatgattcagtctcagctggtatcagatggcgatcgcagggatatcccttcctaatatagcggctaacagcccctacttggatccactgacctactctacagagaaagcatttgtcattccttgaaagaagctatgctttgtatgccgttgtgcggtctccacgatacatcgctaaagacccaaaaatcagaatagggtctactcttctgaaacttgtgatggatctcattgcatcatccacgtggttcagtcgcgtatattccgcacgaaccagatccccattaggacaacgatcggccactaggggttgcgtgtgagtggataaacaatgggaatgtggaatctcgagctagcctagggttccagggccccggactgatctggacactcgcgtggtacatgttttatatcggaggaacgcccagagattgtgtttcccattcattcctttcttattcatacataccataccttcttgttcggttgcagctcactcgttcaatattgggttgcatattgaaagtacaatggcgccaagcaagaggggttggcagatgattgagatcgtttcggtcttggtcgctctgtgcctgatctcgctggtgctgcgtgtctttgctcgcattcgcaggagagtcgggttcggcgtcgatgattatctgagcatgttgtccatggtgctcctcattggcatgttgatcgagctgattctttgtaagtatgactccaccgactggaattcatccgtactaacggctaccagggtgtacaatcggaggcaatggagtccatatcgcggatctctcccccgataccctcgtgaactactggaaggtacataccccgcaatatccaatatcaacaacccaacctaacaccgctagatcttcctcgccaaccaattcacgtacttcctactcagcccttctatcaaaatctccatcatctgcttctaccgccgcatcttcgcaaccccaaagttccaaaaagtcagcttcggcataaactgcctaatcgccgcatggggcacaggaatcttcctcgcgtgcgccggacaatgccgacccttacgctcctactgggaccacagcacgaaaggaacatgtttcaacgcgaaagaattcatcgtcgtcaaccaagccttcaacgtagtcatggacttcgtgatcctcgtcctgcccatcccaatgatctggaacctgcaccgcgcatggcaagacaagctcgccctaaacggggtattcgccctcggcaccttcgtctgcttcgccagcatctaccgcatcgtcgtgctcttctggatcagcccgtccgacccaaccttcaccgtctaccaggcgacgctgtggacgcacatcgagcctgccgttggtctgatctgctccaacttgccgattatccgcggtctgttcccggcgtttaagctgaccacctcgcgtaatggaacgggtccggcgtatatcaataccgattacacgaattctttgttcttgtcgaattctggtccgcgctcgcccgatctcgagtatgctaagatgtataatgcgcagattgagagcaagccgcctggttaccttggtgatgatatccatccgcagacgattaatgttcagacggatatttctatcatcccggggaatgattctactacgaggctgaaccactgaggtggtgtgctgttgatttacgccgttacgatgtgatgatatttttatcttctgttttgggacgggatattggagcgaatgggtttattttcttggaggaaagccgaatctgcttcggctgtagctaggtcggaaatggcctaccggatatcgtaataggactaaacagaaggggctgaagaggatgcagagcgggcatatcagtatgccacttttccttcactttatgttcatacatatacgatttacctatgtacacaatgaatttcttcgattttgcctaataattcatactatacctttcttgttgtgatatttataccaaaattgttatttattcatggatttagtcgaaaacattcagaagtacgttgatagaaaggtgtatgaagccgcagctttcgctttgcaacgacggtattttaattaagtatagtactcgagagacagatgcaacgtatatcagcaatcgagcgtgatttccatttctcggacaggctaaaaggatatgcaagagtagtagaaggcatgagttcgtaggtctttcatcaggatacacagacgagatagagcagatcattcagtgcaccatctggctcgtggcgaattcctagaatcaaatattagcaagaagaccaacctcagacagaaggaaagacataccgggaactgatcagagatactagtcgcaacacgttccacatcctccgcaagatcctgcacaccgagatcccactgcctcagcttcgtcccgttagaagcacccgccgaggagccaccgagagtgtcagcatcaaacgagataaccccatcaatctgatcaatccggccacgtagccgtccctgctcaaccatgcgcgcggcataagcctccgccttctcgccagcagagacatcacccgaagactgcaaccccaggatcgagcccaggtcatcaacgtggatattctcatacagcttgctcgccgccacgagattgtgctcgataaccgccttgtcgagaacggtcgtgccgtccgccgtaacagcgagctggtgcggcgcaagtttcttcgcgaacgcggcgacttcgtccgctgtaagcagcctgtccaggaacatcttctccaagatgccgaattcctcaacggagggcgtgcggtcatctttgtacagacgagcgagggagcgggagcgctgcggaccggcaggcgcaaggacagcacagcggatcgccgcggatagggccgtcaggcggtcttcttcgtcgacgcccggcgcaagactcacgttgaaatattcctgggcggcgtcaaggaagcggcggcgggcatcgaggatgcgggcctgggagagctggaagtagagctttgcatcgtggtcctctattttggaggggaggttcttgatgcggttgaggaaggcttcggcgttggtggtgtcgtcgtcttcgaggtagtagcgcacgatgcggatccagaggcgggctttcgcggcatctgagactaggcgctgcgagctgtcgatgtgaatgccctgtagggtgcgggcggcggctgtgtagtcttcctgggattcgtaggcgtctgcgaggatctcgcggatctgcgagtcttgttcttcgacggaggccgagcgcgtgtggaggagggtgatggcgtgctggccgacttttatttttgtttccgggtcgagggattggaggactgtgatgaaggcgtcgaggagggggcgggcagcgacgatgctcacttcttcgctgaggattgagtctaggtagtagactagatcttgggcgagttcgtggccgctggaggttgctaccatctcgttgaggagctcggtgtattgctgtagctttgttggctggtgcgggtttgtttcgatgcccgctagggcgttggtcatcttttgggaagccatgctggtcgagtgagtgaaagaggttgtcaagagagttggacgcggagtggtggggacatccgagctcctgttatcgataagagctggctggatgtatacagccctattccgtagagacagaacaatggaactcatttaatctggccataacacaggtaggattagtcttatgaagatgattcacagatttcattttccctaagtagctatatgcgtaggggcatcttcatatttgaactaaatgcattgatatgcgccttctctcccttgagtgaaaaagaaatcatatgcatttgaccttgacagcgccacaaatgttaatttaatcctttgaaatgcctcggaagtaaatatcacggacggtatccctggtaatcgcagaatatagtgaagcatacagttaaaatacgcatggtcggagccttggttaggcctatcctacactctttagtccctctagtcgggaacggttccgattatgattatgataattattgatgcctcggggtattcaagcttgatgaaaatgtgacaatgtgacaacaaactacaagcaacatggctttctaggatggaggcgtagcgctaagaaccctggaccccggcatattaggagccgacaccgccagcgcaactcccagtaaacgtgtcttcattatctctatcgattgtatctcgtacacctgacccatagccgatacttcgttgttctatctagactcttggggctttacaagtgcccgaagatacgcatcacttgtgaaaggacgcgccaccgttcctgataggatcaagacctttgtctatcacggaaatcggattgaatatcattatggctatacagagtgtcaggtctacccccgagtttgtttcgtctctctactaccctgtgtctctgactgattaaaatcgcatgaagggccctactggaagcgccgatatgcagtcaccctatcccagatgcatccgggaagctcgcggtctacacacagcggggttattcgttcaaatcgcacagcgcgttcgcacagattcgcgtgcgggagatggatacaccaaggtcctgggctatcaccgacaaccctcatgccaattatcccagatggctcagccgcagcgagaaagctcatctggctggaggtcatagaaaatgggcacagcattgatcgcagataatatcaccttcaacatgctctctcacctagccagcagcacacaagatttgatatatggaccgccttgggtgaaaccagaggagtggagaaaatgggacctgcacaacatgccgggaactggaagacgccacaattgatcatccacggagcactaaatcgtcagcatcctctgaagccctggctgcattcaacactctgaatttgcagtcagttgggagtgctcttctcatatttccggatgagggtcatcagatccggagccccgagaatttactcttgtggtaccgcactgtgcttgactggttgaagaagcatacaagacaagatgcatgagatattccagaagattcagcaagtgctacgaggttgtcaacctacataagcatcatttttagtagttggtagtcatttcaacgtctttctcgaagtttttctctgactctttctccgagtcattttttgaagtgattgcttttctcatagaatgataagaataatctgcaaatatgcaaaccaaaaaatcccatcgtctgcttgagcttaccaatgccaaggtctagatagacgtcaactctgggtgatagcagaagatagtgaatggcgacgtctggcaacttgaagttgtggttacggtaatgaattctacaggtaaaatacgtatattacgaataatatttacgaaccctgcccgtcaacaaccacattacaagaaccttcaaatcctagaaacttcgacttgatcattgttctgtcccacgaaatggcagaattacaggaagttctaaaagactttattgacattcttgacctaagacaggcctatgtctggaatgcggattccgcgaataaacccctagcattcccaagaaacccacgtgcagaaacgcttcttcgacgcaaattgcttggggatcttctgccatatcctacaatgttcaattgcatctggatagcagagggtgaagaccgaggttgcttcttcttcattgcctagacgatataaggaagcaaatgccttatagacgaagacggccaaagaagactttctttgatcaatgatgctaatatggtgtcaaaggggtatatcatggtcgattgtcacgctcgggtaggggtgtgtctaagagggcaccgtaaaacctatctcgaaacccgaatgtagtgtttaaatagagaaggttgttattcttgtaggttatacgaaggctttgaataatattgtggaactagaaactagaacttacatgtaccttttgtacggtctgcctagcaaaaggtacatttatatgggtagaggccccttgtttgcgagtctggaatttggcccttcagcagtatgaggacaattattatcctacttatgaaagaagaaaaggaaaactcaaactcatcataaaaccagcccaccttgggtatcatttatctcgaaactaagttataccaattaaaaccaatctatatccaatatcacagttcacagttcacaatcttacaattcacacctttgtcaccaaagacacacaccgtctttagatctaaccccattccagtttaagcccactttccaagcagagccatgataccagcaccaaggagcatagatatgaccatgaaagccaaccgcttgttgtcctgagtgcggtgagggtcgaacaagaagtcgcgagcaagcagctcaacgagaccagtgtacaccaagattccagcggagatggcatccagcacaccggagacaacattggcagtgtaagaaccagggttgtaagtagtgcggacaccaagaccaatagcgatggaaatgggcgtcgtgagaccataggcggtacacaagaaccaaggcagccagctccccttcttgaatgggatactggacatgcgggctccaataccgagaccctcgaaggactggtggaagaccagaacagggtaaagcgtagcaaactcgtcaccggcaacaccgaggttcaggccgataatgacggagtggaagataacaccgaactccagaatcagcagcgcggcaatttgctgtctgacagagcgctcgatagccacctcctcggactgcgactcaatctctttggcttgcttgtcgtctgcgtggcgtcccgaaacacgcgagtccacacggcgcacctcgcctccagtcgacataatgggctcggggtcttcacggcagataccgtacttgatctcgacgtagcgctcggcaccgaagtccatgaggaagaccatcatcatggatgtcaatacgattgcagggcaccatgagtagtcggcccagtggccggtcataccgacgcaggaggcgggaccgatttcgtcgtaggcgggatcgaggagatggatgaaggctgttgcgacaattacaccagcaccgaagtaccttgcgaagagatagacgtagactgggatgcgcaggcgtggtacacgttgtgcgaccacggggaagaaggttgctgccgaagagatgaacatgatgacgaagatggcggagattcgcgcgcctagctggccattgtattcattgccttcggaattaaggtaacacacgatgtcagtcgggtcggctgtgtccaggtcgacattgtgaggatcgaaggacattttgggcggttatgttggtaaatcgtgccctaacgttcaaagaaagaggccgatataataagatcgaagaagagggaaattcacacggcgatcttgtctacaggtatggcaggaaatgcctgactgttttatattggagaaaaaattttaggcctcttcgggtcctccgttgaagtgaggacctttgggacgtctcggccccagttatattagtctggtggttaccttgtattgtccgttccaggttgcattactcgcttattctagttgccttggacctttgtatgttattataatatctaattaatgtaaatgtttctaatccgcgttgttgttgttgttgttgttgttgttgtgctgagaacttagggcttccatgccccttgagatatcaaatgcccagacgggaacaaccaccagccctacggacgtttcttttgaaaaccaaggctcggccaattgcttgtcgaatcttgggacgatgcaagcctttcacgcaagtcttgctggtgggccaaatcccgtcgtagtgattgggtgttagcgccacgagtttcccccaaggtccctgaactaagattacgcgaggtcaaaccctgccatcacgggtttttcatcgaggagatatgactgaaacgggcaggtggtgcgtagtagctcgaacttacatgtccatttcatcgtcccatgtgtactgagtatgtttagagatgtggatagttcgtaatataaacatgatctgatccgctccgcagagacactttccgtcgtcaagcgcggtaacggtgctggatcggctagaaccgagccaataatggattgagcaaaggaatttacatcgtaagagcggttcgtgtcgcgtcgtgaagatatcacattgtcatggcttcatcgcattcgttagccttgtcgccacccattggtgggttcagtacaaaatcactcagactaagacaaccctgcgagttaaatccggactttagactgaaactcacaaggtctgagagcactaggagaaaatatttgtaaccatgaaaaagcaaggttcatccaacctgaaagcaggaggccatccccatccatttcgactcataattgcctaacactgccctagccagagcgctaatagtaacataaaacataaaaagatcataaaacaaatcataaaaagcggagttgaatgcaaggtatgcaaggtttcttcataactcatctcgtttctcgtatcccatacccaagatctcccaggctgcagagaggatccgaggtctgtatacataaacacataatttaggttttcaccctgtcgtataatatagtctcctcccatcaaaacaagaaacaaaacacgctccgaagccaatcgctgaaatcatcacacgctacctgtgcccgagtgaacctgactctgggaccgaactcaaaaaaagacagtgaaaaagatacaaaaaacagtaaagtgttgcgtgacctatcgttgcacgctagtatttcaaggccattgctggcacgtatttttcaagaagaaaaaaggatgtcaaaataaaaagggcagatcaagcaacaattcccagcaggaattgtaagaaatgcaagaaatgcaagaaaggtagaagaaaaagtgacaagaaatatggtcttgttgagatcacgggactgacccggaaatcaggagtggaaaataccctcctccttgacggggttatcataaccgtgaccttggaccatgcgacggaagtcccgcacaaccttttcaggcacgcggtcccacatcaaagatctagaatacacattcgacgacaatgcggaatgaatacgactctgctgcgcggcggtatcccgcatcgcagcaaacgcctgctgcagggtagatggctgctggggcttgaagtttccgttgtcattctcaaacgttgtcagggagttgtaatggtcagcgttcatcgagaacacctgatcgcgctgttgctgctctgtcggcatgacgagcgtgttatgcaactggtcgagacttgagggcacgggttgcgcagagctcatctgcgccatctccatgccactgatagttgccggcgcgggtccggttgctgttccatggttggaatgagagttagttagctcgtggccagacgacgaggctaacactgctttcagcacattggctgactccgcccggtactcctcggagagttggggcagggagtttcccgggagggacgtattgtttgaggcgaagaaggcaccgacaagcaggaacatgtagaaggcgttccagctgatcggcaggtctgatccattgttggatttctccgggaccttgacctgagcatggggagtttggacacagtctgattgcaggagaggtcccgtgaccgtcgagaagtcatcccatgagtggttttccatggtcgggttctcgaagccggtgaattcaccggtcatgatttcttggacgggcttgacgctgcgctccagctgtttgtttctctcctccagcatgttgttcctcttcaacaggttggcggtctcccgcgtgtgcctgagaatagtttcatctttctccatgtcctggcgttggatgtgctcggtcaactgcctgttgtaggcagtcaattggtgattctcgtaatcctggttcttcattgcgctttgcatgttctggattttctcctccagttgcgcgagctttttagcctgttccgcgataatttcgtccttcaccttgagcttttcgatattaccctcggcttccttcttcttgcgttgacgggattgcaggctattgtgataaggttaacatgtgatccagctcaacgcatcaatctcaacttacgctgcatcacgattccgcagcagtcgtttgatcgacttgaggtccttcttcttctcctcgtccacgcagttccggatcgcgtcgtcgatgttggccaaggtgagttcggcggagatttcaatgcgggaattcctcttccgaatcccatctcctcgccgcaacggtatggccatccggtaatccgggctctttctcgcttgcaactccgcctcggccagatccattggcgccggcatccagccctggctggattgcggtgacatgacgacgctgccagaagccgcaaatggcatacctccacggtacgacatggggttcatgggcatcgtgcaaacgggtccaaccgcaccaccggagaaaggaccgacggcaccctggtctccattggaagcatactgatcatagcccacggtcggggtacatgagcctgaatccgtacgcggcatgggccacgctgcctgcgagcaactttgctggtaggaagatggttgcgggccgtcaattggcatgaacgaggcacccgagttcatcatggtatgcccgagttgcgaatgcgaattggaattggaatttgactgagactggctgctggtatttgagtaattggaccagacggaatcccgatgtgagtaggcatctggggcgtcgtaggaggtgcggcggttgtcggggtggtcttcggaattcggatcaaggatcctgtcatccaacacgctcatctcgtcgtcttccggggtcacgtctaacgttgatggtgattgttggtagaattcagactggaaatattgtgccatcatgaagaggcggtgtgtgtgagaaacggtggagtggggctggggaagatgctggtttatagagaaaatggtatagaggcaaaccacccaagggagaagataatagtcgggaatcaatatgaagatgacatataatagtaaagaggggggaaatatgctgtgatctagttccgggggggaggcaggatatgtatgagccgatgcagcagtgctcgtgcggttcgatattgtacccacaggtaccgagtaccgatgtaggtgatggaggatggcctgtcgatcaagtacctagtactcatcccgccgtctacgcgggagcgcgagtgtggcccccggaacagcatctccgttattggctgcattgttttgcttgggcagacctgcatttgttgatgttcgactattttggttggtattttggttattcttgaattttcggctgggttttattttatttctcattggaaggttttttggtatattttggttttattatgatcagtctcaatggtcatgctggcggggataattgactacattggtaccaaggatgggaaatgatatcgtatacaacatagtgcttttccttcctcttctctccgtaaacccggagccaccaacaatcctaagtgggggaaggagtcttccttctctttcgggcttatcgataaacgatagcctatcgatcgatcctcgttccgccggccgtagacatccctgtcgtggggaggatatggtctgtgctataccttattcacggcgcttaggtagaatacccaatgctacttcggacttcacctgcacgactacctgaaactactgtttgaaagtatatttttgtacccccatgtactaaactgatcccctttgaatggtcagatgtccagtctaactgtcatccttctttctatccgccgctaacagccaatcattcccgagtcagtgtgacggcttctttgggctgccatccatggcgccttggatgttttgctttttttctttgttgtgctccttattccgattcattatagttcccttccttcgtatagtctaggatgagtctctatagaatgaatctttgggacgggctcggcccgctgatccactgttgggccgaccatggatgagaaaagaaggaaaaaaaaataggaaagcacggatgtcatgcactgatcactcgtcccatccagatgacaacctccccctccaaaaccaaattccccgaatggagctaccctggaggttaaggctcgatagcttagagtaagagcttgggtcgaaaatctcacacacctgatcttgctcaatcttgccgtgatctacttgcagctctctctgcagctcccatatggctgcagcagcctcctttccaactcttctgagctcacagaccacatttaatccatgatcgactatgcggagtgcaggggacatgatgccatcgtattgacgggtgccttccggcttgctgagctgcgggggggatatcctaatctaccactattattaccaatatactaacatctccaacttcgaccacgattcaccatgagctgtcattgagctgtctcttctttttttctggctttcccccacaattcaatcagtccccatctctagccttgcccaaagcgtagaccgggttcctgtcagttcaattccccggagcacacgccttcggcggcagccgctgagtctgttcacaatctatacatagcacacagcacatatcctgtgccagtgataggcctgtcacctgggcggcaacttcgcgggtgggcaacttagcccggataagatctggcggtgaaaaagctgagtctgtccaatggagatccagtatgccaccggtcaagcagtccacccgtggacgggttcactgctacattagtcataaacagggaaatattttcagtcaaggtcccccggcggcattcttgttttttactagctcatgacgcttccaccaaatgcagtatagtcttctagaagccggtcccagtatcatagtcctttgcgtatacaccggtagattcagcacccgtaccttccctattgcgacactggcatattcgcccttcctgcggtgaagctgaaaccaatgttttgccatgtgactcggaatgaaactggtgatctaccttctctgaatgagctagaaggcagtggcaggtccacggtccaccactccacttgcattctaatatttatgtagctaatggtccacttctttcacgctgcatacaacttggaatacgacgtacactgtacgtgcccaagggtctgtaaaacatctccccggtgcaagctagccggatacgatctcaaagcctcactttgaagtggtacctgcctgatatgccgtgcacagggtacattgggcacatcggatgggagtaagccattgccttggaaactggatgtgactgggccactagctgctcactgctagccctcttttatgctccacatgccggattggggactcgttggcgtttttcatgaatgtagtctgcctatcggggaattcagcttttcttggacccgtcgggggaagcatatttgatctctgtgccgaggatcctccttcaccggttgaaatgactcattctgtagtagggcgagagatgaatgaaaggtcttgagagtttctgtcgcttggtgcggttatgaccagctaacacgtcgtcggaatgagtttcaagcaggtggaccaacatacaggaatcccaatattgagacagagaagctattactcagtacttccgctagactgagtcactatctctttttggctattctcgtccgatagactggctttctgctactattcttgtccgaaggattcatattcttttgttggatgacgtttccaattttgcttagagcagattttctatcctgcactaaagcccaacagtcaattccaacgtagtagaacaattagtcttccaattcaacaattcaacaaagccgaaggaccaaaaccaacacaagatggtgttggtagacaagcccatatgcgtggcttgacctagccgccgacgcttccaagtgttggtgatacgcagagtttgcaggatgtcaagagaagagtctaggattatgtctagctatagcccccgacaatagatcaattggttctcaggaattacattctagattgaccttgacaattgctcatttagacaaggaagtgcttgacttcaacccgtacattatcaccatctcgacttgctcaatcgagacatgccgcggcgttgatcacaacgttacatctttgtaaatgttttaaacttgcattccaactattgtctatgactgtactcttccgctttccatttgaggtccaaatagcatccttgctgcctagcactaggtgctatttgatatacccctccatgtctatacttggagggcactgatatatatattgatcacatagtcaaaatactacaacacactacattgaaaacaaagtatacaagaaagattctaggctctgtctgtcttgctccttatttccaatattgctttcgtggctagcaagtttcacaggcttggatcatccttgtaggtctcggaaggatatcctggggtgcagatttcaatattgcgcgctcctataacagtctatctatatttcaagcatcatgcatagcgaggcttatccatacctctacggtcacacaacctcatacttcatgtcaccagtcaacaggacatgggccctgcagttgttgctatcactgtcacatggctcggtgattgccgaagtactatactcaacctgacgtcgacatgtgcaactatggtcagcagacatagaatttaagaggcttagtacacatgcaataagaaacttcaagataacttatttcaatttttttcaatttcttctcaactgaatgctatcgacatgttttcggggtatgggcaaaaagaatgaaaagcaagaaagacaactatccaatcaactacaaatgccagaatttaggatttagaagcggataaagtcttgctgctgcgacaactcgccgctgtccacaccttcgatcagttcttcgggggagtcgtcgaatgtatccgagtcaacgtcgtccgaatcaatagcgtcatagttttcttcctcgctagactgatcagactcatcttcacccaaatcagctttgctagcagcagccgcagcagccttgcggatctggcccgcgcggtcaacatgcggcagctggcagcgctttttgtggcaggcgccggtattggcatagtctgggcactcgtggacgtgcttctcttcgcaggcgtcgcccttttcgcagtatcctagggttgcaaaggcgcggcagacgggggcaccgggtgtcacgcggacgtgggcgtagcgacattccgggttggcgcagcgtcctctaaggaaatgcatacaagtgggggagcgatggggcgaaggctcatgggatagatcacagctactacctgcggcacatttgcctgtctggaggaagtccttgcacatagcgaccttactagggtcatggacgaattggcaggtcgggcctttgtagcaagtgcctagaaaattagacgtattagtttttgagcatacttatagggtagagcatagaagtatggcccgtcggaaaacaaaataccggttgttgtaaatcttttgcaaagctcatcgcgcttcttaacagtatgattcctattgcaaggttagtataaaggtaaccatcattaaaaccaagactcacttcttcatagccacagcaccgagacggtggaggtttccgtttttgcttcgcacaaaggacacatcggcaactgtgacgcgcttaggcgtactgttggcagtactagggtcatctatgaagggtaagccaattcgagaggaagagcgaagggtgcacgcactcgaaatacgaatcagtttgcttccgccatttgcgaccctgaaaggaacatcattgacaagaatctgatggccagctgcaggatttgcagcggtggagaccactgcaccagcacctggaccctgtgcatatcgaagtactttcgctttttcatactctgtttttttctgttctctaagcttgcgcgttcgttccatatcctttgtcctgtcctgtgttttccgatcgtagacagcagggttgatcagctgcatgtggcgatcgtgcttcacgacccaaccattgctagaagatggtgtcgaaaccgccgcgctgtcgttcgcactactcggggcgggtgatgagttggcgctaggggtcgaaccagcgcccgcggtgttcaaaaccagcgtgcggtgtcggtgcggagcagctgctccacgacgtcctcgaccgcgtcccctgtagtatggggcccatcctgtgtgagaagggacatggcgagacacatattgagactggtagttagctggctgggtctcttgcgtcttgtggcggtttatttggccttttcatgttagctttgtcttgacggtgaactgatactgagcgcacctgcaagctgaccgatcttggccaggagatcgtcgttttcgctcatggtgactaactgaagctagatagggtaagtgggtggcagaccggatatctgagattttttcagattaagatcagaagctgggtggtatttcagaagaagttctgagccggtgatgcggaggaagcagcaaagacgcgctcatttagcgttggtgtgattctgggagggtagtttgtactgtttgcatgggttaggtgccttaggcatgaatacaaagtggcgaggaggtccgtgcccgggatgagaacgtcaccaaccaccttgaacagtacgaaggagacaggaaaacacgtcttcgatgcttgtgcagttacatgaggccaaaaaaggactcgctttagcattagaacctaactttgaccttaccggagagcagctccacgtccaacttgacaatcaccaacgaattactccgtaccccgcgtacaagtacagaaaagttaagaagaaatagatatagtccaataatagatcagaggcttgttaaatacactcgatgtccacaccagggatgatcaagcaatgggcaagctaaggtcttgctgaaaatcatccccacatgctgccgctatagttcgcaatgtgtatactgttttatcacacgcctactaggagatctgaagtttacaagaaagccaatcgaaggcgtttagaagtcgataatattgggcaagaattactggctcgacgtgcttacgccaataaccaacaagaaatgcatacgattctggtgagacagcttggtcaaattctcagaggctggtcactgcgaatcctaaagggatttgtcaagacatcaatcgaagaaactgtttgggaccaaatcaatgattgtgtggaacccatttgtcatttcatttcattttattttcgaattgaaccaggactcccggtctttccttgaaagccttaacgccaggacctgcttatgcaatatatcgaagccgttatctgggtgtatttgtttaaacgttttcaaattgaacatcgtcctgatctattccagaagctggatcgtcctctgactcgtaaggatcatcggctcctggtggcaactctgctttagcattgtccatcgcattagagtactgactgtgggttgcctcgggcttcagttcccaggtcatagcgaaatcaccagccttgacaaggtgtgcaaccatctccaaagtctgcttgagatatgcctccggctgtgccaatcgggctttgagtgtcttaaagggccagtatttgaattcgcggaagcattggaagataagatccagaagctcgttttgtggcatgcgggtggacttgttctcttgggatttccctttggaaggtcgtgtggcttgctgtagacgaagtgagtaatctagcctaagaaggaagggaacttccaaagacttaccacaaattgacccctttcggtgggaagagcatggcgcgcctggatgatcttcccgggaatcttatcaatgaagacagtttccttgcgaggtttcagagcttccagcgctcgcttctcggatatccgtcggaattcttcattctccacaggaaggcaattgaattcttcactgaccgcgccggcgagggcagtgtgttctaagaattgtgagcaaatacaactcgccaggtatgcagtgggacatacttggtatcgtctttcgcacataaggctcccatcttttgccctgttcccgccgcttcgcttcacgtttttgggcttcgtatagaaccgagcgcgtttcgccgaatgtagccatgcggttctcaacaccggggatgtccttctcggtgaatacgtacgtattgtgggtgaggtgtgatccagtgcctgatgggtcgaccgtttgacgctggagtgtgtagtccttgggaatctcccgattatctgggcgatcatgtaggcgcaagctgacctggcaaacggacacatgtcagaatccgccaggcaccctgcatacgcatgtttccacttactcttttgatgtcattcggtgtcccctccactctcatagtgccaagctcaatctcctcgtcatcgtccagatgggcccagtgctcccacagcgaccgaggcagacgggagagccacacattctgacctgcttgtgaaaagtctaaatccccagcatcttcatagaggtcttcttcatcaatgtctctcagggcaatatccttgctgtcggggtcttgtttgaagtacgggcgatccgggtcttgcttgacctgcgccatactggatgtgaggtggctcgaggacagtcggaatataggggaattgacggtgtgtcaaatgcgaccgtcaatgcgctactgaatttatcgggagagaaagtggtggatgtggtgatcagcgcgttcttgagcgatgaagtccgcgccacccaagtctggagctattcactcaacctgatgtggtaggcggtgagagctagcttctttatatatgacgacgtctgaccgttcagtattagagtgcataactagctagtaattcatatgctgaattgtgctccgaccatgaatgtggaattacttaggtggtattcttaggaatttaactgagcgaaatatagaaccattcttttgtcctaccagtgtcataacaatcatcatactcgacaaccaacctgctatgttgtaccaataacacgtctctactgtgagtagtggctattcgtatactacgaagatatataagccggttcctgcttgcatctttctcgtaatttctttattataacgtgtgtgattatgaaaaatggcgcccttgtactatgaaacatcgtttcgtcgcagtcttcacagttcaccttttcttgaattggagacgtacatctatcctcatttataaaaatcaaggctattcaagtccaattcttcaatggagtcattcaagccaaaccattcaatgaagtcgttcaagtccaacccttcaatgaagtcattcaagttcgcgaatagggatttgaaggatgaatcggcacaggtgtgggcttgaatgtacccataatgattttgatagtgggccgaggtactccattctggtgattcaaacgccaataccttctgtatgagatctctgtgactgagattcaggaaaggagccgcaggccttggcgaaagaagattacttgactgcatctgaatagtaagggctccaagcatgattgacctgcactcaaactcacagccccgactgccactcaggagggcatcgcgtatttcatgaagtcggaaaactgagtgattgatggcctcatgtctccgtttgttcattaatcctgcgatttaattagatactaagcagcttcagaatttgtctggccttaccgatgacctcatgagagatcggaagcccccaaccatgaacataagttttactcaatgacatgacagccgatgttgtctctttgaactgggaggagagctggaaaaaccaggaaacccataaccacaaaatcaaattccgagaatatgtcataggaatcttttcctccagattattgatccatatgtccgtcatgctatagacagattccttgcattcatagtaatccgctatgacagcaactttggcgagcatttcaagggttagctttcgcggtattcggcggtatttaccatgaatagcatgaagtagaatcaagagtgctccgatgtcccagctctctgcagtaatctccactgagcctttttgcagataaatagtgctttccttccaacccccagtgaggatccttttgaatactgaggacgcaaatattaaatgcttcgcagagacttgaatcttgacaagcggttcatagacttgctcttcagcaggttcttcggcagcaggttcttcggcagcagggtcttcggcagcagggtcttcggcagcaggttcttcggcagcaggttcttcggcaacagggtcttcggcagcagggtcttcagcagcaggttcttcgatcggtggtgatgcaggagatgatactggctcagaagaggaccgaatggctctcaatccttttctagatttcttcttcttcttttgcttccctgaataggttggtgggggtttgatcgcttctgcaggactctggagagaatgatcggaatatgaaacggtcatgccagctaccgtatctccaggcgcttgtgcaaaaggagagtttgcatcacgcaatattatgatcacttcaccgtctggatctatgatatgagttggttggtccatcatgtttatcaaatagactgagagatgaagtttctcttcgtaaaaggcagacaaaattggagactttccggggataggagaagatagaaggaggaggagattacgagagaagtcgggcagcaggtgagaaggtaggtatgcccaaccgacaatgagggggagatactgatgcacgtaggcgtctaggaatgaattgttgagaccctttctgccttaggttgataggacctgctccctaccttgtttgatcttacctttcttaatgaacacacacatacagcctatgatttcctttcccattatagatgctgatgatggatctcactaccgtcatcaagatctgtaactagcgtcatagagataaaggaatagagcaacacaggcctgaaagacacaaaggcagaaaaaaaagcctaccaacatacatgaagacagtcaaatgcctttgataccaaccataacagatctgtatcttggttttcttatggtctaatggtaaaatgtgctatattatgtttcacaatacagatagtttactcccaccatgcagctatccggttaaggtaattaacggcagtctttctaaccgccagtgtgccatatcagggtttgcctgcagtaatatatagtttgtaatataagtattttatatcccggaatacttctataaataagtcgaacattcaagtctaatcctcgatatgcttgaagtcttaccatctgaaatcttgatgcgaaaattctctcattccatctgtagttaaatatttatttcaactatattgcgattgcattgtaaaaatattgttgagcctcaaagtatcgtttgcaaaggtatggtactttactgaaccgccttgcactgcttaagcttggaacccatagaattatccacggcctaataataaaaatgtgtcaacctcaagcagttagtctacagcgtcaacatgttaattggtacttttcatctgggtggcagggtttcagtggtttcattgcggggcggatttagctggcgcttagctgtcgatcaccttctgctctataataaggtgcctgcttttcttaacagacgtattattactctaggattattttcttaacaagtctactattactcacatgacatcagtccaatcacgtattcagtaagactatcagcagacatggaactcgaaatgcgtccaagggcttcggggccactcagaatcctctcacttggtttgtttttttaatccccttggatagaaaatgagggttaataatatgcctcagatggtggtggcattcggggaatctcgagtctactgatcctagaaaggatcatggaaaggatccgcgatgttcatcatcttgattataccccacgcccgtgtgaccatttcgacttgatcgggggtacaagcactggagggtatgtctgtgtgtggtacatacagggttaatgtactaatatactataaggatcatcgctattatgctgggtcggctgggaatgaccgtggatgaatgcattcgagcataccgaaaggtcgcggagcgtgcttttactcgcaaggcacatgccattattccagcacggcccaggggagctttctctgcgcgcgcactgcaggaggctatcaaacaggtagttcgggagttctgcacagaaaaagaatgcgtggaacgtcggcgcaatggtctctctataactgactgtcaacactctgatctaccgtttcgtgagcagacatgcaccaaaacgtatgtagctatttaatgcagagattagattagtattgacaaataacagggttgttcttgcggttacgaaagtgaatattgacgcgggacctacgctctttcgcacatacgacaaatccactgcgcttgatggctgcgctatttgggaagttgcccgcgctacctcagctgcatccacgctcttcaagtcaattagacttggtcgagacaacatcgagtacattgatgcaggattcggctataacaacccatgcgaacagcttattgcagaagctaagaaggtgttccctggacgtagcgatatgcagactctgagtatcggaaccggcattggagatgtggtcggcataaaaaatgggcgcctgtcaatcattggtgcactgaagaggatgactacgtcccccaacagggtaaacaccaacatggaagactaccatggcgacagcggccagtattttcgattcaatgtgcaacatggccttggagatatctctttgtcagactggaagcaggctagcaggatatctgcatacacaagcatttatctctccgagaagtccaaggatatcgagaaatatgtgaagacgtatggggcaaggagtcaacaaaatgagctgaatgaacctcagtttacgaagattctaatagtcgaccctgttcaaaaagttgacgtggttctaggcaagctaaaggcctaccatatgatcccctttgttgcaaatgaagacttcactggacgtgagattgtactaagcaggctgcaagaaaggctctttcttcaaaagaccgcccgtaaagtggccttgtacggaatcggaggcattggcaaaacccaggttgccttgcactttgcctattgggtaaagaacaacatgccacagtattcaatattttggatcccggcattcagcgaagccagctttgagcaagcgtgtacgggtattgtgagagacattggtatccagagaataaagcaagatgaaaacgatatggagatggttcgtcggtatcttagctccaaggaagctgggccgtggctcttcattgtggacaatgcagacgattacgacatattatttggaagcgacggtgtgcgaggtcggctttgcaaatactttccagctagtgacaccggcgttatcttgcttaccacccggttcagtcgggtggcggaatgtttcacgtcacagagagatacaatccaactcttgccaatggaagcaaatgaagcgattgctttgttcgagaaactcgtggcaaatactctcatccacagtcgaaagatgacagaaaagctactcgaagagctcagctggctgcctttggctatcaagcaggcagcttcctacattgaattcaccaatgtatcagtttcacgttatctcgatcttatgcatggtacagacgaagacaaagaaacccccgcgagttgtcattttcatgatgatactcgctacccgcagctgcagaattctattgctcaaatatggcgtatctcattcgaaaagatcaaaaggtcagatcctatcgccgctgatatactgcagttcatgtcttgcattgcgccgaaagccattccacggtctctcctgcctttgtacaaatcggaagcgcaaactgaatccgcaatcaatacgctatgtgaatatgcattggtgaccagagggacagatggagtcacgcttgaaattcacgatatagttcagctcgcaacgctatggtggattgaccaaaaaggcgaagcgttagagacaaccaggaaggtcacgcagcgtatggtcaagacattctcaccgcggggccagaccaatgaacatacgaggagggcgtacgtacctcatgctcttgaacttcttcgtaagacagagggtcgagatatacacgaacggtatgagctcatcttaaaagttgtgtcctgcctcatagatgatggtagggtggaaacggccatggaattactgaaggaaaaggccaaatgggaccaaacccgccattgtgaagaacatccctctgggctgagacctcaaacatttctcactggggcatatgcagcagatgggcagacagaaaaggccatgaagctgagcgagtatatcgccccggcgaaagagagaggaatgcaagaagctcactctgagcaagtgcttccagaatggtttccagcgcagacgagcaagctcagaaagcagcagagctcttcggatattttggcgagacggaattatctgagacagcagagaaatcagtcagcaaagcgcgccctaacctacgagagtgtcagcctcaactcgaaataccttgtggacagctcgggagattacgcgggcgagagagtcactcaggcatgtggttatgatcgggcagagacattccgcccaagagggattcatctctactagaatctcactgggaaatagtatttttgtatgacagaaggagcctatataccacttggaaaaatggggatttgtttgtttggcgctaactaaaggcttcatttaaaccacccaaaaatatggccatacatgaatttgtatggtgctaaaagcttcattttcatagggtcatcggacctggttattccgtgccggcatagtcactgtaaatagatacagaaaagcggtaaattcgggcattaaagcctcaatatcttgaaaatgcccttcgtagataagactaaaacacttatgtaggtgtgatacgactaagaaaccaactgaaaaaagttgcagggttgcacatcaagaattctgtctagctatctaatagcaactggcccgcagcagcttcttaggtagcacactgatcatatttctccccaagtcccttcaaaacgaccttcaccaagccacctaatgtacctgctcggttgatttccactgtaggaatctccacacccagagacctccgtagccaattcctaacctctatagccatgagggagtcaactgccatgcccgccattgcttcaatgtcatctgcagaatctgatccctgatcctgcatctgccctgtaagattatggctgataaatttgcctagttccttcatcaaggcgacctcagtctctctcttccccgtcagcgagggatcagcttgtatctgggcaaggagggcctttaacgcatttgcatgagaggattgatccccaccactgccagcactggtagactcgaggttggggtagatcaaaaaacgagcgtcgcgtccaccgaggaagatttccttggggacatcaccgcggcgcctcgtgtgcgcaagtcccattgcaattgcaccactcgcattagaatcactgactggggatatattgatcgccgcggcgagtccatcaatcacttcagcttcatggagcacatgcagcgcgattgactgtactctttgaaggaatcgggagctccgacttgcggcacctacatctccaaccaccccgaggtggaaaatagaggaagggagcccctgctgtcgtcgataccgggtgaatgcttccaaaaatgtagttgctgctgcataattggcctggccggtgttaccacataccccggcaattgagccaaacacgacgaagaaatcgagtgagtactgcaatgtggcatgatgcaggttccaggttccagtgactttcggagccaacgcagcctcccactcctcgtggctcatctgcaggaacagtcgatcctagatgctatattaggaatggcatttaggagaaagggagaaaaacacttaccttcaagtcaactgccatttggaggacaccaacaaggggccgcgtgcatgtggcaacagcccgcttcacagcttcaagatcggtcacattgcctagcacacagctaacatgacaaccttgcgcctcaagctccccgataaatgcttgatcctcctcagatttgccagctgatcgcgagaggaagatgagctctcgcgcaccctgctcgaccatccatgttgatacggatcgcccaacaccaccaagcccgccaatcagaagataagcggcgtctgatcggaatgtcgggaatcttttgacgataggaggaggcaaactgtccacggaggatggcatacgcaccaagatcttacctaagtgggtgcctgcctgcatatacctaaatgcactgacaatgtcgaccgcatcaaagactttgacaggatggataggtccgattttcccttgacgataccaatctgaaaatgttgccagggtgctgtatgtgttagttcagcttttgttcactcaaggctcatctgagacaaaccttttgagaatctccggggtttccttgcaaacttgtgcgaggtcaacaccgaaaaatcctcggttagcttcgaaaagactcatattaagtattccgtgacttatgaagtcacgttttccgagttcaaccatccgtccgaactttgcgacacattcccacgaagcgtgcagtaagtttcccgacaaagaattgagtactacatcaactccccgtccagcggtggcacgcattaggtccggttggaaggaagtgttgcgagagttgaatatccgttctcgaggtaaaccaaaatgctccatcaaatgggctacctttttatcgttgccgaccgtggtatatatctatattgacttattattagctccacataaaaaaaacgataacgtgaggttgacctacctcggcaccaacagctcggcatacttgcagagcggctagcccgaccccgccacatgcggagtggatgagaacggactgttttcatgtcagtaactaccaatagtcgagttaaatggtgactcgcctggcccttcttcaaagcaccaatctcaagtagtgaatagagaacagtcacataggctgttaacatcgtggccgcatctgccattgacaacccctgcggtagcttgatacaagcttcttgaggcacaacaacgtttgagaccagaaccccagaatgcatcaagatgacacggtctcccaccctgatatccgtcacatcaggtccaacttgaagcacaataccgctgccttcgaggccgagatcttctttgtttccgaaaaagcccattgcaaccatcatatcctagaatatattgatcaacgatatgcaaggttatcttgggcgcagaaaacttaccttgaagttcagtcctacgtagtccatctcaacttcaacatgcccctcattcaactcatatgatggctctttctcggcccagtgtattgtatccagtagcccgtacgtcgtgagagttagctttcgggacgcatctgatcgaggtggacttgcgagctgctcgacgagaggtgtccagtggtaccggccgaccttaatctcgccttcatgcaatgcaaactcatactctggataaggaagggagtgcgcgcgggatctttgtatcttctcgcacacttgaattacggcctttgcacccgctgcatcccatgtggaaatctccagaattgagagatcaattaaaagctctgatcgtaaagtgcgggcgaacccatggatgaaaccgaacagtggatctgagcaggtgcgggacgttgactgcgtgacccacaggattcggcattcttgcacttgctcaatgtaccgttggaataccccatagtcattcttcggcaagcaacctattgcagctccttcaagatctagcagagacacaatgaatttgcctttgggtgggatttcgtgcaaggtagtccagtgagtggtatagcctttgtcgcggaatagcaattcgacatcactcgcccactgggacgggctagaatttcccgtgagcaaccagatatcggtaggaatggatatatcgtctaccggccgtgacaccatgctggcagatatatgatatggcggcttttgatcataagctgttacatctgctccggtgaaacctgctgctcgtagctcccgatcccaccgctcgggtgagatgtacggttgctctgctcgaccatcatccacccctagccaccagccggtaaatacaccctaaaatatgtaagaaaaccagatattggtataaggaaaatttggtacctaccatggtgaaatttgcaattaagatttctgtatcctagtcagtttagtcatctaagctggagggatttgacgtacccgggctaatctcatggagtaagaagcgaccggtgggcttcaggagacaatgcacatgagtgagtgcggtatgaagactgggggtagcgtggagaacctggtagagaatgtgaattcaacgttattgggttgaggcatactagtcaaatacccacattggaagcgatgatcaagtcaaagctatgagggtcaaacccttgttcgaggggatctagggtgatatcaagaactttgtattcaatgcattgttcatgaccgaatctctcggttgctgcagccataaaaccagaagagatatcagtaaaaacatactggctatacatgcgctccccactcgtggacttgagaagctctagagccaaggcagttgcagacccggtgcctgcaccgatctcaagtattcgtaggcctgggttggaatgacagagcgacggtaggaacggctcccaaccggcatactgtgtgtgcgcagcatggaattggtgcagcagattgtccttcatgaggacctccaatgggctactttctccagatataaaggctttgcagttatcgaagacaacctgcatgcaatccgcaagtggagcatcaaaggtaaacttggtttcggctaacactttccgtgtcatttcctgtctgtctgccgagcttagcaatgcccactgagatgaatctgggtagattgattgttgtccactttttttgatattagaagctgcgtccatgatgaatttcttccactttacgaaatgtgatgatcttggctcgaaatcccgaatttgctccgcggtctccagaacaaaaagcgcagatagctgacccaaggctttaatattcatagcctgtgatgtataatcgtgtggcgtagacaaaagtgctgatgattgcaagaaatcaatatccgatttccactcaagatgggttactgagcccgcgggtccagtttcagaatctatattatcattttccaaggcaaaaagataagctccttggatggagagcaccacccgatcgtcaagcatggcaacggcatcgcccaattggccatcccttgtaccgctcttggtccgggcacttgctggcataggtggaccacctggtccgacgaacaaggaatctatcatagccgggacataaattgttgtgaggtgtcgcaacaagccctgagaacaggccacacccatgagttggagacattgatcaatcgccgtgggatgaagcgaatacctgctcccaggcagcccacgattacccagaatggtcgcagttgccctcggtccagtaggatcggctgtaatcttttccaagccctggaactgagggccgtaatctataccgctcctttgaagtactcggtacacactttctgatggcaaagctcgcttataggaagatattgggaatggctctgggggatgatcggacccggctcttacttgaccctgacaatgcatcgtccatctttctccatcatgggccatgattttgaaactataccagccggatggaaccctgtcagccacttcgaccggactgaggctagtcacgatctcgatttggtcttcctcatggaacagtagtggtgttataaatgtcgcattgcgcactgaataactatcgttgtcaggatacagctgctggactgcctcacctaccatagcgacgaacccagcgccagggaatgtgacggccccttggattacatgatccaaaagccagggcacgtcgtccagcgtgaccagattacgccaagaaggctcatgatcagtcgtatcgacgacccgcgagccgaggatttcatgatgcggaaacttccgatgcctccactccctactcagtcgactctcactccaataggagcgatcatgttgccaaggataaggtggaagatctgtcagcgtattcccgggctcaattaggctcgacaaattgaatcctacgccgttcgcataggcctgtcccgctgtccggagtagctggctttggacatcctcgtcatacctaaataaggtgggaatatagactggtgacttcgttgcaagagtccggaggatttgtcgcagaggggcggcgagggctgaatgcggcccgacttctaggaagactggtgttccactagtaggtaggctttggatagcctcggtgaacaataccggtgattccagattctgtcgccaatatgatgcatctagtttgcgagggtcggtgatagtgttgctagtcacactagaacagaaaggaagcatttcctgctcatattcgatgtggctagagatacaatgttcatattcagagccaatctgtttcatctggtctgcaaataatgtaagcgcaagggtaaaagcgcagggcacagggggggtttaccagaatgataggcgattttaactgtaagccgccggcagagtgtatctgagtttgctgtcttgatgtttttggtcacatcgtcaaccgagtctttatcccctgacaaggtgacactatgcggactattgtggcaggctacaaccactcctggtgtcaggtacagtgccacttcgtccggggaaaggccaacggccaccatagcgcctaagccttctagcggtttagcgactttgcctcgatagtatgctataacgatagcacttctcatagaaatagctctggcagcatatgcggccacaatctctccgcttgaatgcccgacaactctagatggctcgattccccagccccgaagaatatttactagtccaatttgaagcgcaacacagagaggctgagagaactcggcttcgtggactcgagaaattgaactctcttggcttagttcatctggaaggtacgttagtgaaaatattctcgtaacttcaggggtgaagccctctttctgaccatataataaccaattcgggggatcaggtagctgctgcaatgcttcatccattcttttgatatcttccttgaatgttgggaattcagacaagagctttagccccattccgggccattgagcaccctgacctgtgaacacgaaggtgacatttggggaactggtgttaagaattgaaaatgccgcatcatctatcgctggattactcggctgcaccacagcgaaagcccggtgggaaagatgtgatcttcgcgcagccaaagtgaacgaaagatcatgcaggcggtctgagtgattctttacatagtcggtggtctggctgatacgcttgcgaagagtgtctgctgtgtgtgcagacaaaactaggagctgagggctggaaagcccgagcgatgtgggttgggactttggagagaccgaagaggcggactccagaatagcgtgggcattggatccgccaataccgaacgaatttacgctaatcctttcgggcctgccagcaggccacggggtcggctctagagggacatgaatatctgcctcggtgaatggaatttggggattcggcgttttgaaatggatattgggtgcgatggtcctgtgttcaagtgacaagattgatttgatgatgctagtgatgcctgaggcaccctccgagtgaccgacatttggtttgacctggtgtacaacatcagtaagtggtttggctgtagacagttctgcaaatagggaatactaacagcactgatatatgtcgcttctcctcgggtcatctttgcaacgactgatgcttcgatgacatcgccgacggctgttccggtcccatgacattcaaaaacaggtgtttgctgtatcgcgtcaattcccgcaatccgatacgcgtgacggatcaacctctcctgagatattggacatggctgcgaaaagttaggggtcttgccgtcgtggttgctcactgtggagcggatgacggcgcggatcgcgtcgttgccccgaagcgcgtcgcgtaaaggtttgagatatatgcagttgatcccttcaccacgaccatagccatctgcctcagcatcaaaagtatgagagataccacttggtgacaaaaccatatttttagtcatggcatctgtcatggttgggctccatataaggctcgtcccgcccaccagagctgttgtgcactctccagatctgagtgcttgacaggcctcatgcaggcagaccagggacgaagagcaagctgtctggatggtcatgctgcaaggggtcagagacttttgaaataaagacagcagatcgcactcacctcggacctaggagatcaaatcgatacgacacttggtttgctaatgcataaccaccggttgcgataggaaatatctgcgtcagatgctggggatctttatgcgatatctctagccaatcttccccaaaaccgccaacaaagcaaccgattttctcgccgcgccacttagtctcccccgagttctccaggcactcccaaaccacctccagcaagagccgttgctgagggtccaggcgcgccgcctcgtggggagggacagaaaagaaggaagtgtcaaaacaacctggatcttcttgcaaaaagaatcctcttttcgttttgctcagatctccacaatcggcgctgctagacgcctctcgggagcagcgcgagggaggtgcctcacaaaagccatctcttttattcacgagcatttcccaaaattcatctccacatcgaacaccgcctggtagccgcattgccataccaatgacagcaattgggtccccaaagtcctcctcgtgatttctgcatgatgtttgtccttgtccagttattgaattcatttttggttgaatgatgaataatttgagactggatcaagatggctgcatagcagacaaagcaaaggttgaactagggttggagctctgatatcacaaggtacggccttttgacgatcgattaatttcacgagtagattggcgattaagcaaatctacacacaatatgtacctacatacccagctctgcaagatgcaggaaacacatttcctccgaaatcctccgccaccggaggaatgatatgtacctgaatggcgactaggtcgtatttccagacactgcaaagaaaggaaaccggcaggtagttccaacctgccctccgaaaacagggcattctcaaccctgttcaacgctgctccaacttagactcgcaaatgtgactgcaacacaactagtcaccgaccttctatctctatatcacttgccatattgaagtaagtatatccaaggctacgaattgaagaaaaaaacaagcagcctcattataggcgacgttcttgttggagatcttaagcttacatgagagcaaagctcagtctggccaccaggtggtggttcatcatcactgagatatattgtcacaaaggctagaacaatcagaaggaaagctcggcccaaaaaagcttacaaccctccgcatgtccaacccaatctcctaccttccgggtgttcaccgtaacccaccctcatctaggtattgggtctaatgtggcacacagaatgtacttcgtgctaaatatactgttagacacggcccagtacaacccaatgaccctcaaggggtaatgatctaggtcggttatgtcgtcgcattccgttattcggaattaagaagcgctgtggcgatctcgactatttgttccgactttattgtgtgctgatatggacggtatcttattttgctcgacgcagatccggatatttacgctttgtcaaggggtgagacacttgaagcttccttaaaactggtcagcagtgaatgattctatgccggagctggccgtgtgaacgaggcccaaaagcaagataatgatgtatcaccactctacaagataccgtggcttacaaaaatcattactggtaactgctggtgagattttgcataagtctaatccaatagtacttctatcctcatccgattgagaactatccaggccacccaggtacgttgtctggttgtcctagaaaatttcgttagtacaacaccttctatgttaagatactcacaacttctaaccaggagcagcaaccgaattttaaccaagatggacagcgaatggtttcgaggacaggtcgtcttcgtcacgggggcaactggtaacctcggcggctgcttgttatacaagctagccattcaacttccaaccgcgaagatcttcgtgctggtacggggatctgtccaaaaggcaatcgaagcatgggagcagtcaatgccagagcaagtggaggatgttatcgccacttgcaagatccaattcttcctcggtgacatgacccggcctaacctcggtctttcacccgccaacctatcacgtttacgaaatgaggtcacagtggtgatcaatactgctggtgacatcgctctctctcgggatctcgcagagactataccagtcaattgcactgctcacctgacactagctgctctactagacagtttcactcagctgcagcgtttcctccacatatcaactacatatgtctccagctttctccctgacggcgtggtcaaggagcaaatataccccctatatgaagacccggcagaggaactagagaagattctctccacaggaaaatcatcttatacgaaacaattcgcggctccctacgcactggccaaacacctggctgaatgtttgcttctgggtggtgaccacaaatttcccatccttattgtgcgaccctgtctcatatcaccagctattgcggagccctacccgctctacggcagtgatggtgcgatacctgtacattccttcctgcagatactcctaggagacgcggaatatggacctctgaagcttgagcagacactacctttccatgcagcctgcaatgagatcccagttgacctcgtggctcgtacttgtctagctcatgttgcccaaggcacaactggtgtagtccacgccagcgccgatctttatgtctcccgttcgattggggacctgctcgagcggatgcgccgccatgcaccagagggagccgctgatcaggtacaaaaggctgggattgaccatggagaggtcacggcccccgagttttacaccatgatccagcaatttgcacgagactggaagattgaatgtacgcgatctgctcacctacagcaggtggtgggtcccttgggacttgaccttggcgatcatgacccagagatattctttaaacttcgtatcgagcggctggctaagactcttctggaaaagttggaaagtgctagcgtggcaagcaacaaggtctatccgagtatctcctgaggaataatgactgggctttggtggtattattctacatttctcgtcattggttgtcgttttgtattagagttatcgcatctgtggtattttcttaacaactcatattacatggttcgaagggctttctcgcagagtcgtgctaagtctagattccctttaaagagaggaaaccaataaagcgtgtaataactacatgagcttcctattgttgagtgtggtgatatgggtgttgttgattattattctccctgagcaacggtatagaatatctcagcattcaatgttcaatgctttgtgcggactcaagtatcgagagagagcttgaggtatgaactcggggagagctcgggtgtgacttgtttggtcacggtctagtgtccttcatttgctccgatgagattgtgaccctacgatgttcgaaccgcagttcaaggaccggcaagctacatgcgaaagaaaaggtcacacaagattagtctggtggtatacgtagtatacattccaacctatgcgaggccagtggccgaatgcctgattttgtaggattgatgacttaatatgcctgaattcttccttatttccagtaccgtgcgaagatatcgaggtcttggccgagacgcagatctggtgaagaatggggggttcaaaggtgtgaatggcttcaaaaggaaaagggaaaaagggccccaaggttctttaacagcagctagcctgaaaacagtttcctcgttgccatagggtagacgcacctcgctcagtatatgagacatcagagagcctactttttagggcgggctctacataaatgaggcttgtgtggtgtgatctcagtgtcgaatttagtctagttgtaagttgcttctcttattgtagacctgtttaaatcttctttctgtgatgctctctttgtaccctaacagatgcagttttacgcctttcacaaacagacaaaagtgaagtaaaactctgcctttgcctcttcatcttccctccatttctccttgtcttcattttcatttcacttcatcatctctcgcccttcattcttatcatcctctcccctttatcctttcttctcctctccacttcttataacctaaccatgaagggttcgctcgcaaatgagccgtcgatccagtctagagtcgatgcgattatgctcactactctgctcggctaaagcgagagtacaacaatcccagtttgatcggatctactgcatctatctccagtatcaattccgtcaactccctacatttgcaatacaaattcgcgatcaagtgtgagtgggttctcgaaaaggaacaagtcacggttcgtggactattctcgtggttcagaggggctcagaacctagtcactaatatggatatcgtagaagccaaaagacttggtagggtcgagggggtgttccaatgtcctacatggtggaccacagtttgaaagaaaaggctggggcttctggcacgtctgtatacggcatcgcttcgggcagctacggtgatagtttattcatattcgttacaacgagaacctcactggcccacaacgaccaactcaatgggacgatgaggtccgcacaatgaacccgagaactggatgactcataaatggatgagaaactatatatattcgtcttgcctagagataagaatcctgattcctcagaagcgaagcttcctgcccaggttgacgcgatggttgtatcggtggaaactgtcctttcctagcctgcgtacaggtcccgagtgagtaatgcgcgaactaccacatcggcggccggagcgaacaaaaggaaagacacaccaaaaccgcagcctatccgaagccttgaaggaacccaaccttggaacgcacacactatgacagtacggccacgtggacctcgggcctatcccgaggaccggtagtcattatctgccggcgcacgtgacggagaccttcccgcaacgcggcaagattggcccatctcccgtctaacccactcatctccaccaatacccgtacgtcaataatccacacggggcacgccattcgtcggattacccatgtcgaagccaacgaataggacactccgaaaaatcaaaacagcatatcagttgcatcactatgccagagaccggtcgcgagtacatacaatggatcatcatcatcttccccagagcttacacagtgacacacacgcctaccatcaaccacggatcacattctaacggagctctggtcggaggccgtgacttctggatatagacaccgaccttgtgtcgctctgaggaatgatcaagaacgacacgtcaaaagcattcgctggtctccgagctcgagcatccgctttcacatcatttcctcttcatatgttagctatgcggccggagcaagagggttgaaaccggagctcagatatgatcctggttgagacgactgaaccgtatagcgaggggaaatcagtgatccttgtcaacgactacaaccagctaaaggcattgacttttgctcgtgctgtacaatacaacgcttccagccagagatctgacctggctgtcttttgcacacgtttcaatttacttcgtatcaccaaatgtgccattttataccttcatgctgttcttatgagtgaccctcatcaacgaagcctcttcttgggcgagaggatttggatttctctgaagctcatccatgctggtctacaaataaggttggagagatacctagttatacagtcgctatgataaggtagtgcacgttgggtgtcacgattggcacttgcgggactcgtactttcccgtttggggttgtaccgttggtcgttccttcccgttcgaaggaactcgtttgcgcagacagtcgtaccttccttctgggagaagcgagaatagggctatgcccccgaaggggtaaaaagacccatttgttatttttacgtttgttttgttttcttttccttcttcatacttgatattcgtttagcaatgcacttcttctgctagaaagaacctggcacgtaacattggggacgagaccggtgtgcagagctgggttcaacaagccatgggtcaaattatacgtctagtccaccgattgaggaccccttttcttctgtcagatgtggcgatccaggtattctaccaaatttgtatccaaacccacacaaaacttcgttccgctttattggagatggtggtctaagtccgccactcgggcataccatttattaattattgcctgtagtcaaaatggagtatcccatgtttctttcctcgttctctatgaatacctcaaattcacttatcccctagctcttaggctgtatgccatattttaaaccttccatgtccagatgagagggccatgaacctgagaagttggtatggcattgagctcctagtacctgtcatgttctcacgatctgtatgattatccctcacgtgactatagatcgttgatactttccaggtcacttggtcgcttcttgtttgctatttgcctctttcctttgttcttttgtttgttctttccttcccagggttgtttgcactcgagctaagcgagtcgttcgagttttgcatcgtttgcagtaaatccagctatataaacaggtcgattcccacttctgaacttacttcttctctctctcttcatcattttggatcaacctaaccacatccaacatgcctacctatcgtgtccatcatccatcacatgacttgtctattcttatattcgttcttcagacaacccaaccaccttctaccttccaccttccaccgtctatcgtccatcttccactttatgaggtttgtttcttatctgtgctatcacatattcttcatcttccatcattgtgttctataccttggttaatacctgatgacatgaggctgactgtactagatatgtgctcacatccacattcaatcatccacatctaaattccacttcaaccaaccatctacattcgactactacaatgcttgacctgaaagagaaggaatgaaaagaaacggtcttgatcgacagagtctccgcaggagtgtctctgaaggagacttctcgtcgggaagaggttacagcgtgtacccatttaaaggagactctcaagaccgtttgctgtggtggtaaaaaaaaaatggtcgcctcgacaagcaagcatcaacattcaaccatccacttcaatcaaccatccaaatccaagcgtctatatccaagttccacttcaaccatctaccttcaagcaaacatccacattcaatcaatcacatctaatcaatcacttccaagcatccacttccaagcatccacttccaaattctactgcagtcaataatccacttcaaccaatcatccaaattccatttcaaccatccaccttcaatcaaccatttcaagtatcctcgctcagccttactgtgacgggcttaggcagcaaacacaaaagcaaaagcaaaaaaagaaaaaaaaaagaaagacaaaagaaaacacgtcgaatcattccaatcaaccacatccaatcaaccacatccaatcaaccacatccaatcaaccacatccaatcaaccacatccaatcaaccacatccaatcaaccacatccaatcaaccacatccaatcaaccacatccaatcaaccacatccaatcaaccacatccaatcaaccacatccaatcaaccacatccaatcaaccacatccaatcaaccacatccaatcaaccacatccaatcaaccacatccaatcaaccacatccaatcaaccacatccaatcaaccacatccaatcaaccacatccaatcaaccacatccaatcaaccacatccaatcaaccacatccaatcaaccacatccaatcaaccacatccaatcaaccacatccaatcaaccacatccaatcaaccacatccaatcaaccacatccaatcaaccacatccaatcaaccacatccaatcaaccacatccaatcaaccacatccaatcaaccacatccaatcaaccacatccaatcaaccacatccaatcaaccacatccaatcaaccacatccaatcaaccacatccaatcaaccacatccaatcaaccacatccaatcaaccacatccaatcaaccacatccaatcaaccacatccaatcaaccacatccaatcaaccacatccaaattctacttcagtcaacaatccacattcaatcaactacttcgagcatccacattcagccttcctatgaccggttttggcttcatgacaattgacaggcttgctacgacagcaaacacgaaagcaaaataaagaaaaagagaagaaaagaagaattaaaacacatcgaacgatttcaaacaaccacttgaatcatctacattcaaacagccatttcaagcatccacattcagccttcctgtgacgggttttagcttcagggcaattggcaggcttgcaacaacaatacaaaaacagaaaagaaagaagaaagaaaatacctcgaatgatttcaatcaactgcttcaagatcctgcatcctaaaaaccacttcaatcagaaatcaacattaaaccatatctacaatgcttcgaccttgaagaggagaatgaaaaggaacggtcttgaaccacaagagtctcggaaggagtgtctctgaaggagacttctcgtccggaagaggttacagcatgttcatttaaaggagactttcaattgattcatttattgattctacctgagtttaattcttagctgtggtttatgcctataaaaaagactatgtaaatatgctatacaataggctgctacaagggatgttacgaatggagccattatctcttggccccaaatcctcggctttcccatccaaataaatattcagccaatcttgtcttatagtgaacgttatgcttgctatcacacttcgattatttgtacatagctaatctcaaaacagctaacacatacagaacgagccgctcaataactccatcactaacccaatactccaaaaaatgctaaagcaaaccactcagttcatcttgacctggaacaaatagcgctgtcggatctgcgcaacatcatacacaatgtactcattgtagaacaggccacggttttcagataggtgggtgctgccaatagccacatcaggcatcttcacaccctccaaagccggattcaaacatccagcatccttccatccaccaggaacgttcaagcccttgccgagtgtagcaattttgccagagttgcgtgcatcctcgccagcgttatagttgctatctacaagttccagcatgggtgcaccgagctcggcatcgcagagaagaagcaaccccatcccccggctgttgtaggcacaacagtagtttgcggatttgctcgaggtatctgctaaatacacacccttgccgaacatgtagccgttgacgggtgcttcgggcggcgcaatgcgcaagccttggctgaggataccaccgaagtttgtgctgcgagatccatgccagaggaggcggcggtcgctgtttggaatgctggcatagggggaggtgttgaagcggtcgttttcgccttggcgttcgatacggaagatgttcacgaccttgtagctcatgttgtgtgtgtcgccgcgagagttcttcaagtagttctcgagttctacgaactcggttgatttgtggtccactgggcaaggtcagtttggtgtaaaattgtacgttccgcaatttatactcacgttcggtcatctccttcatacccaggctctggaactggcgatccagcgcgtgggtgtcgtcgccttgcttggacgataccatgatttcattggcaacgtccatatccgtcagtgcttccagcaaatcaatttccttcttgatctgcgcatttgtgttcaaggttgggggccgatggcggccaaagacgtgaggaatcaaggtgaaatatcggttgctcaacgtttctatggcatcattatatgattggccatattttgcttgcgccacacttggtgtaatcatcagctcggagatctcttttagagccgagaacccgcttttcaaagtccggtcgctcagcttcccaagtggtagtttgtggacgtcataggacattgcagccaacgtgtcgagagcatcctgtttgttgaagatgaaagacatgaggttttgaagtcccttggataaggcactctctacctcgggctggtcctcttcttccttgatggttttttcctttttcaccggctcttcatcttcatcgtcctcttcatagttgcgctcaaggaatgtgtactttccgtttttaggggtatcgagccgatccacccatttcaggcctgatttgtctctgaacttcttttcataatgcttcatcgcggctcctaaactgccctctccgaggcaggctgactgcccatgctccccaactcgaccccagcgtgtccaggtaaagtactttgagtttgtaccgctcaacaactggatacgatagaatttgttggcattgttggccgaaacggtctggctcagggtggcatcccagatcagaccggcactatcaatgtaaaccttgggatctgtgccgtgtgttagtctgtgacccccacattaggtgtcgcattgaagacttacccttgattttaccaaattccatgaagccctcatcgactgggacattaatcgtctttttggttgtcttctggatgtcctttgtctttttgtcggaaccatttttgacggggtcttcagtcgcgcttcgtttcttgcttgcgggcttcttatcctcggatggtttagctttgctatctgcaccgttcttctgggtgtcttgtgtttcagcgggagccgtatccgcacctcgcttcctagtaatacgcttgttttctgcaggagcagcatctgcagtcttctgtgtgtcgtcatctggctgcgacgcctggccgaatgaatacttggactccggcaatggtttcttcgcttcggctgattcaagaagccacgaaagtggaacaatgtggcaattggagacttgagatgcttgtttatctggtcgattggttaataagagagccccgaggtcgtacataatatcgaaacatcgccgtagctattatcatccccaatgcggtctgtcaccgtttggagcattggggtgggagtatattggccattgccaaattcacaaaatatcaaacttccgagatcgtgtatgtggtagtgtactcacatttggtagtctgcttctccacatccttctcagtggtcactaaatgggtacattcatccgtgaccgctgtgctgaaagtcgcaccattcccctcaataagtgtttttaagtccactaggagtagtagagtggtcagcatacggattttggtggaggtgagctaaataagcctagcgaatagggggctcataccctgtctcaggttgggaaatgtcccgcccacggtgatgacgaggtttttgaaacttcgaggtgccataatgttgctcaattgaaaaaaaaggcaatagggccaagtaccaagagtaacaaataggaatagaaaaggtagagattgaagaggaatcaagtacgaggtgccccccaggtgatgtgtatgtcaagggaaagagctaccaggcgggagctaacacaatcgaaaatcaatcaaaaggttgcaagctgggatgaaagtacagaggaagagacagtcaagaaaacatgaagaaacaagtcgtcttttaaataaaaaaaagacgagatgttgtcaaggtttgtggcctgggggatcgggcattaatgaggctgctgcctatgggtgccttggtgctgcctgagctagccaaggcagcacacccctttttgtggagaaggcgaggctgaaaagcactggacgcttaaaggcgcaatctacgcggctaatctctacgtaaactaatttcccagttccggactacccgtacacattggcgttaagggttcttctgctggcgatgattctatgcctagttcgaatactaatgcaaaatatttggtttaagtctagatagcatgtctgattctctgcggaatctaattttatcgagattcttcaagacataaaatttccgatttctactcccaggcgttttctcttagacagaaatgcatatcaacttattgaaaaaaagatcctgatacctctcttcaaacatcaccacttacacctcagtttgcctagtttaatgggcataattggatggatgggacagaactttgacaccgtaacagtccctttcaaaagctatctgacaatccggagagaaggccggcaatgtcatccaactgttgatgactaggatattctgtgagttactgtcccaaagaacctagacatgaacttgtttccccgtaaatataaggcagagatagccagggatgccgtctttgtcgaatcaagatcatactgatcctaggctcatgactgacagatataaaggataggaatgtaagaccatcaaaaattggatattgtattgtgcaagatctctgatggttgaactatgaattgcagggaatcatatatgacaaatgatatgatctagctagatccagaaggctctattccttaggttatgacggcctgcgttctatggtagcctgcatatccaggccaggataggagatagccctaactaattgatattctgggctttttgcactgaacccgacggtataaggcataatacaggacccagctctctaatttttggtgttattgctagaacaatgataatcagctacgaaagtgccagctgaaatgggaataatagcattgagtacggagtggtagttagacatgccgggctaatcacgatacgtaattcggacttgcccttttgggacacgaccgccgctccggtggcgtactgcttgttcccgcccccgagagggaagtgccccgcaacgacctgtcaacaagatgaacgagacatacaacgtataaatcattcaaaatggagctgactttcttgattagtcgcgatggaaaaaatgccaagaggggacatgcacggcgtgcgtgtaactcttgtcgtcacaaaaaggtgtcgcgttctattctagacagccctgcaatagtcggagtcggaggttaacttttctagaaacggtgttatcacaatacctccccggagcaagtagatgatgtgacttgttcacccatcttctctggtctcgcagatagccggcatcctgcacctcaagcttcaaggcgggatcgagcagtccgaaatagatctgcatctccccgatgtgagcgatcaggtgtcccctcactccagaatccggtggaacaagaggccgaatccttcattggccctaatgcagatacccctgcagaggccgatcaagaatctcgtcgttttgcgtgtgattcaaaccctatagcgactctcatggaacagaacgagtcaaggttgcagggcggtcgatcccagaaaggagatgtaggtgcatggttgggcaccgatgagagttccattgatcggggcgagacccctgactcttcacaaatattgctagggacccatgttcaccccggctgcctgcctccgaaagactgccaacaggctttgatcgacatatactttcgtcggatacatccattactgcctttacttgatgaggataacgtgcgaagccaacacagagcgggaactctcgctgcgcgactactgcaggtgatgtgtcttgtcgcagcgaaggaccggggtgcggtgcctttcctacgccttggtccggattcaaatcccctcccactggagaaatttagcaacattctgtacactgatgctatgcaaaacatctcgagaaggcctgagaaaaaagtacttgcaatacaaatattggcgcttttgtcactgcacgaatggggctccactggatccgaggattgttctttgaatctggcccaggctatccaccatgcccagaccatgggattgcatttgctgagaccagaccaacattctgatacatcttccaggaatcttttctggtgtctgtggagtctagaccgatggaacgctgctatgaatgggaggcctttaatgatacacgacggagacagaagccatggggtggacgacgttatttcaacgttccgatcgccgtttcgtgtctggcttcgaattgccgataagctgggagaagtgattcacttctaccgaccgatcataaaaagcgtggatcaaagtgaactcgatcttccctcctttgaagaccttgtggagcactgtgaggcccgggacatggctccagacctgcttggtatgaaactttccgtcgtttagttgcaacattgtctaacccctagaccgcagagtccttggagcttgtttatcattctgtgattattctgtcaacacattccagcgggttgcaaggccgatcacagccaagagtgtcaaaaatccgacaaggtcattcaattcttaccatcgcgtcgctaagtttcaatcaggatattcggaatctagtgccgtttcccatgatcggttacaccgtctcgctcgccttttcagtcacgtacaaacaactcagagaaagcaaactgacaagtgcgcgccgcacagccatttcccagatccgtttatttcatcaatttctcaaggaaatgaggactacgtggtggtcggccgctgtgatgactcgtctaggccagcgtgtgttgagcaacattcaacccactgtagaccaggaacgttccacaggcccagaaatcgatatcacccgactaaactctgcacatgaatcgactcatatatctccacggcaacttgctgccactgagaatatgcaatcgcactcggctgccgacatcccgaatgtggggagacggattaatgcaggatctccgagcacacaccctctagccggtcatcaactgggaccggaccaacctttgaatctcgaagtagacagcatgccattcttaacagcgactgaaattgaggatttcgatacttttttcggcaatttccttgatgtcggttttccaaactgctcgaatgatcaattattgctagatctcgacatggcagactttgaatttgctcctcgcgatctagcttgagaagctgcacaaagatgagaaggcagctcggtttcaagtcttgtgtaagtacacattgagtgcgctacttgatagagtcatctgatcatggtactacagaggaaatatcaaactcatgagatgtgaagagaaggctacacactcccgctagaccacatttagtatgttttccgctggccgctgtttctgaccacgccatcgtcataaatactttatctaagaatcccgatagcctagttgtggatagcggccatcggaaaagttacccgaagtagcttagtggggagttttccgctgtatgatagcttcctcgtgaagagatgttcatgtatcaatcactatagtgtatgaaaaccaatcctatgtattcttctagtatctcaaggataaaataacatgatatattacatacttcagaagtagcagtcgtgtgatcatgggaaaatgttccagtatagatcaaggaatgtacccagcatgtcagaaaaagcttctgaggaccaaccttgaaagattttcgcggcttactgtaacataggtatttagacagcattacaagaatgtcggtatttccttccgcggtgaagagctgcgcttgtaggtttgagtccttgaaatcagttcccgaccccgtttaggaatgtccgctccgttgcgcagggacgagtataaagacagacaatgtgccatgatttcccgtgtaaatttgccagacccgattcaattgagttcatattatagcttctgacttattaagctaatattccttggtctttgacgatgttccgccaacacatcaccagctccgaattgaggtatgattgttcctgttcgcttttccgacatgatctaatgcatattccatagtcttgatcaagcatgcatttttatttcagaacagcggcatccagtgtctgttactggaagattcaatctctcccttgcacgagtcgtatcggtcaagaatattaaagtgcggttgaggggaacattcgcaatgtgagactctctccacatacttcgtattgactatcttcttacttcgtcatagtccctttgaaggaatcttgggatcagacagccgtgaacagatcacgttcgagcgagaacagcctctagcttcttcgaaaacgctcaaatcattcgaaatgccggcaggagaccacgcatttttattcgatattccgcttcctagcaagatcctcgacacagccactggcgcaaaccatcaatatcacacatattgcgtcgaggccattgtcgagcgacgcctcaaaagcgattttgtggtctcgcagccggttagaatttaccaggtttctaatttggaaacgagctatttacgactacattgtccactggtgagtctattgcatctgatagactttgctacatagatgactgaagatattagactctcgagggccactccagccaaaatatccagtattgcctctccatcactgaccggaacgttccttttggttgcacgtttcctgtggaatgctggtttgcaccgctgttgaaatatgccaagctcaacactgtcacaatcaaagtcattgagaaacaaactgcgcggttagaagctactgctgcagactcagtgcgacataacatgcagtttatcactgcagcacaaactcaaactgttctctccaagaccatggatttctctcaaggggatgagtctccggtagacggttcggaaattgaatggcggttcactacaccagtttctctgccgcgaactctcgatgcctgctcgcagagtatctcgactagacatctcaagattacgcacgagctttctatcaatgctgagttctgtgatgaggcaggggctgttacagctgtggtatgtaaagaaactcaggcagagatttatgatatacagctaacaaggagttagatcacggaatttatgccatttaagattcatatggcatctaatgtgattggagaagatgcgaccattcatgggcaagatatccaactcatgcagggaagccaaagccctcctccagcttacggcgatcgtctttcggacctgatagtatcggcagcttctcaactaaatatttgtgagcaatctataccagcggagacggaatatccgtgttctttgagtgagcacggtgcaagtatccataccatggagcctgctcctcgatacgaagaggtcttatagtctgtttgtttggacttttgtctacttttagtttatgagtttaatgaatctcagaataaatatcggagtcttgagcgcttcactttcacaaccccttctcattctgttaaatactatatccaacctattccgtcgacctcaagtctcactgcatcttgtaaaccaacccctcttcagctcctacttgtccatgacacagtctctcccaccctccctcgataccattaggaccggagacaccactgccaaacacaatctgcattcccggcacgctcaagtgtcgatcatccagccatttctcccactgctcgcctcttgttttgaaataggtttccgggtcgacagactcgagtatcgtgtcttgaacaccagaagtgttgtattgaacctttccaagctccgccatcgccgctctcccagcaatcatctcctccatcgagtatactttctgctcattaccaacctgaacaatgacaaccttgcaggattgcaactcggcatgagtcttgatcagagaaagcgtgtctttgagagcatttccccgaccaccaaagtcgacaataacaatcttcgaaggcccgcgactaaccagccactccgcgcactcctcagaaccaacatccccatacccaaccacattagaaggaacagcaagatgtaaattccgatccgcctcctcgatggacgccacagccgacgtaacctgcaacaagcccagcggcgcggaaccacccagcttccgcgccacgtagtacgagaaaacacgggccgttttcgtcgacgcggcaaggtttactacaaccgtggacgacaattccccgtcggacagggtccagtgcaacccagtatggttccccagtggatggatgggaggttggctcgggttggacgagaaaacgtactcgctgaggacgaacccggctaccccacctatgtacagcgcggtccaggccatgcggtctagctcgtcccgtgcgggatctgggaggttgggtgcgtgcgtcagatcggagatcgggctcgatgtccgagttaccgtgtagcggttgtacagtggcattagttgttggcgatgagcactggtctcgagccaatggtcttttggtgagccgcgtttgagttctaggtcggttggcgtgctggttgtaggccagaatccgtagaggagggttcctttgggtagttctgggatctttgtctcttctactgttgcgtaaccccaggctgggacgattccccatgccgaggaatcgttgtatggtgcgggataggactcggatacggggtatgcgtcccacctgccagtaattgatgagaatcttatttcagggcatttctgacagtctcgtctagtctggaagatattcggaacataccaatgcaagaatccacccattagggcgtaggtcaaattgtttgaagtgaggctgatcagctgcgtgcgaattcttactgaagaatccgatagttccttctgagtagtggcttcgaggttgaagctcgcatgctggcggttatccagctttgagaccacatgaacgcccatggtgagtttggtcgtgaggaaattgcggatgagaatgagttagttctgtaagctactcgattactgaacagattcatgaagattatccgggaggagcctcgccagattccttgattcttttaaactgaatggattactgatcagagtcatagagatcatccggcggggaacccccaccagctgggacggcgagagtcagcccgattatgcactgttgtgcatgacagatatatctttgaatgatattctattgctttattggtttatattgagatctgtcatcgaattaatcacgtaactattcaaattcaactatgtaatcaatcgtgagatccgttaactatatattccttgttccttttcggactaacaaacatctctacatacacgaatgagtccgcctttactgacacaaatcgataagagtaagatacaaagcactaaataaacacaaaaaccttgagcaaaagcgagacaatttaagctcagttctatggaaccatagagatcccagaatacgataaagaagttacagatatgcccagtagaatgataaattagcagaatagattttccaaagccgccgagagcaaagaattaggaaaccaacgaagatgagtgttagtgcaaggaatgaatgcagaatgaaaccgccgcatagatagatgatcagatgagaaatgagatgacagatgcagaatagatacgaaaggagagtggtataaacaggctcgagatatcagctcgatactcgggaaaggcgaagatttgaataatggaatgtgagatcgcttgtaaaatgacagggttcatgctcgcgctttgcttggcgcgggtgtatgcagagatggtgatgtgatagggattatgtatgtattttcgttcgtagactgttctcgtgaggtttcaggctagtattgtaatgccgagggttcaaggtaaccaggattggggttgggtgcttggaagggtgcgatttatttgggttgagattagaaaatgacgaatcgtttctgtttggcaggcttgtcgatttcatcttcagtttctaaataattcagttagcaaaatgtgtatacaactcggttggtttactcaccctggacatgacttgtggcctgagccttgcgctcggctttcttaagccgggctgcactgcgcgtcgctgcattgcgcgcagcagctggatgtttgccctcggccgcagcccgaattgtagcaatccgatgcttggcccgctcatcgccctgatctgcggctttgacataccacacattcgactggagaggatcacgccggcagccaatgcccatttcggtaaagtagccgacagcatactcagccctcgcgaggccgagattcgcagcgcggagagcccactcatacgcctcgttgtcatccttctcgagcacaggctccgcgccaacgagataccacgcacaaagcgccatcatagccagcggatgtccgttctgcgcagcattggtgtagaaatggatactgagcgccgggtcgcgtggacaatttaattttccgtgctcatacgcatccccaagccgatagcaagcttcgacgtggcccagctcggcagatttagtgaatagttgcgctgcataagtggcatcagggaagacatcatctccgaagcctctttcgtgcatcacaccgagctcgtacgggccagagttatactgtgcatctgcagactcggtcgcgcgtttcatccatttcacgccctcgcggtaccgcttgcctagccccatatcgccagcaatacaggcgttggccatgcggatcatggcacccgggtggtttttcgacgctgcctggcggtagaactgtactgcgcggctgccgtcgacgcgacacccccagccgaactcgtagcttaacgctgtgcggtagcaggcttcgacgtggccgtgtttgctagctgcgaggaagagcgggaaggcccggtcgtagtcctcgacgcctttgctgaagaggcccgacgcgtatccgtcgccgagatagtactgtgcgaaggggaagctgcggtctgcgaggcgctggaggatggattttgattctcggagtagacgggcgcgcgttatcgggctggagtcttcgacgtccacgggcggcatctcgcgcatcgagttcaccatgaacacggcgaattcgtacagcactgttggctcgtcggttttcttgacattcgccaggtacatctcgaatgtctctttgtgactaaggagggaggcgttgtttccgactgaggcttggagacgcgagttgtcgaattgcgtggttgggcctggctgcgggtatgatgtgttgagcaaattgaggaatgatagagacctggtttccggggttcctgacgaggagcgcgcatttagatacggggatgcggagaggttacgtcggtgacgcccatcggaggttgaggagtatgccgaaacgggccgcgacagccttgttcgcctcacggccagcttatccgtcgaggcagacgggttatctccattgggtgcaggtttcctggtaactgccgcggccggttgctggtgatggtaggccagaggttcatagttgtcctccactagcggcacgctatccaagctttcccgcgaggagccgttatggctttgacccgcgcgctctaacgaggggcggctctttttatttccgtgtccgtcatccttcggatctatcaccgaccacgagccgctgctcgctggggtatgaccgtacgaattcgaatgtgtgtagtgggcctgtgatgagtctcgccgctggggatgggcaggattccaggtgtgctgaggcggctgtacggggtcgtcaagtgacaggtctgtgaactcagggaggtccaattgcggcgtggtgggcccactgtatgcgccttcgatgcgcacgctcgaggcatcgggaatatctgcgctatgtgcgattttgaccggcgagcgcggagagtgttgaatgacaagggaggtttccgatcgcgatgcttggtgggctggtttgctcaggttcaacttctggggtcggttcgggatagtccgtggtgtttcggacggggtgaatgacggtgatgatcggaggtaggctggtgggggagaaggcaatgcctggcggtgtcccggggcaggactggccatggtggagttgggaatatcaaagggcgaaagcgagcggaatttcaagatccatgaaaagcgcgaacaggtggactttatggggaatccgagctgtggagaacgagtggacacgaccactattgatatttctcatcgaagcgagcaaaagaaaagaacggtctctttcaaatcgtcattctttcttttcttttaatttatgtttcatgcgcctaatacgggtggggatgaactattattatgtctctcatgccctcgtctaacctaaataccatcagttgatgcctatcggatctgtaaatagggctttccgagacattcatcagccgcgccggtctaacagcgcataagacatgccttcaggtcaaatcccctctttcactgtggagacaacatgtgctgcttcacgtctttagttcgcctttagttctctttagtctctctttagtctttccttagtgtcttggtagctcagtagtgtctttagtgtccgacctttccggttgtgcgtggcagatgtggatggaaagtggaagtacactatatatccgtcctggaggtcagctttaatatctactccggactccgtgactcctatttgaaacagaggcttgagcgtaaatggcgaatatattgcccctttcgagtccttctctaacatgtgagaaacaaactaatcaattgagtttatccaatccatctccatgtatactccttgcagcagtcaaccacaccgtcaaagcacggacgaaaagcaaatctcatctttagatgacgacatttcctacgcggtgagttcattctgcttaacttgataccggcatccctcgcagtaagtactagatattcggtatttggagttgaagctctgtgctacctctggagacatactgtcggcattctagcaagagccaaagaacgtggccggacaaggataccggactccacagtcaagatccccagcaaatccgacgccaagttggtttctcaatgggggttatttcgaattgaaagggagtaattgcctgtggacatgatacattcctttcttcttcgttcaagatggtcgatcgaaaagatatggccttcgagttcgaaacggcttgatgcatatgcactagttatggggccatgggctggacggattctgggggttgccgtgatgatcggcggcctgttgtcgatcactggttggattggcattaccccgtacaggattatcctgagcttttatatcgaaaccatattgattttgacttgtttcaagagcaatatggaaagaactaacgcgttctgctgaccagaatccagcctggtggtacaaatattggtgttttgtcaagggttcgcacatatggcatgcattacctttcgattagtattctctgaagcttggatctgaatcacaccgactcaaacacaatatgtgagctcggtcttatctagatgtatcacaaagcaggttgccagttttcacaaggcgtgtcggactattaactatctagaatcggagtccgtgtaacagtggcaatatctaactagtcggcgtggcagttataactaaacatcaacagtctaagcccaaaatagaaacaaggaccccgtgatcagaaggaaaatggttgttcctcggctgttgtttccatttgatgaatttattaattatgaaccttgggcgacatctggctaaccgtggaaacgagagagtttaatttatctccgcggccagctgggcaggtgattggggtattgcccctagcgacaaggaaattatttatttttatttttatttcttaatatggcaaaacaagcctaacctccccaggtcaagcgcagagggagtcccgtgtacggactactccgtacagggtctttgtctcagaacttcccttttcccttagacacaattgctattactatttctactgctgcattcgctcgtctctgtgttttggaccctttcgttttcttgcgtagtggggactttgttattctccacccgttgcacaggccgaccgtaccactttcgctgagaagtctcaactctagttgctggtcaatagagatatcgaaaactgaaagaaatctaagattcgtacggaaagacgaatcctatagctcacattgtcgaggaccgggtctgcgcatttgacatgtttcagtcggcaagcgacatattgtgaacagtcttatccacacattcgctgttgatcagcggaaaataaccgaagtgagtaggccagtaagttcaatccaactaacaactggggtctgattggctgacatcgggaatcttaggagatgtctttgccgcagcggccagggagaccctcgcctcggcgtgaagaagcccgcgcatttcgcgaaccatcccagcgccgtcgacgggatatcgactcgggaacttacagcgacgacccgacttcccactcccatcggcatcgccgccgacattccagccatcggagagcaatggacacggacgaagaacgcatggaccggagcggggatgtgagacacaaaaagcgcatggtcaaaccagagcgcaggaaagacgaccgtgaccaacccaactatcactaccgtcagcgatcaaatcacatgcgtatttttccctcgacaacgggaaacgatccgttattggataagagagatgaggtggagacgaacagctcgcgcagcatggacatgaagagcaagggtctttacgcgcggggtaatatcaacaaacccatggagcgtgtccctagcagacatcgctcgaagaagaagaagagaggctcgcgaaggtcaaggggcgttgcggaggaaaagagacgtgaaaaggcaattgagcagagtggtccgcccgagttatggcctacatattgtgtagttctcacattcttcatcccggactttttgctgaaatgctgtggaatgccacagaaagagcagcgcactgcttggcgggagaagatcggccttatcagcatcattatgatgatcggtgcttttgtcggtttcctgactttcggtttcacggctacagtttgtgcctcgcccccggttcggttgaaggtcaacgaagtcagttccaactacatgatcttccatggaaaggcatatgacttgtccggttcgaaacaccccgctgtcactggtatctctgccaatgcgaatgttctctacgacttaccacacaagtatggcggacaagatggcagcttcttcttccaacaggtcaacggtgcgtgcaagggactgattactgctacgtctgatagcgatattccaacaaactccgatggagatctcggatggtacttcccttgtgcgcccttcaaccaggatggttcgtccgaaccgaatacgactgttgaatattatgtgggctgggcttgtcataccagcaaggcggcccgcgagcctttctataccctgcacagtgaaggggatgtgtactacacctgggaggatacaaagaacaagagtcgaaatctggccatatactccggaaatgtactcgacctcgatcttctcgcctggtttgacactagccaggtgtcctatcccaaacaattcgacgagctccgcaagaatcctgatgtccgcggtgttgatctgacttactacctgcaaagcggggaggagaagaagatcggcaagtgcttggcgcagatcatcaaagtcggcagtatcgacactgatactgttggctgtatcgcgtcaaaagtggtgctatacgtatccctgatcttcattctctccatcgtgggtgtcaaattcgccttcgccctgctcttccagtggttcctggcacccaggtttgccgcgcagaccacgagtatggcctccgacgctaggactcgcaatcagcagatcgaagactggtccaacgacatatatcgacccgctccacgaatgaccgaacccaccattcccgatcgcctcagcaaacgcgccagcttcctcccgaccacttctcgtttctccagcccgtataatgtgaacagcagcgctgggagcaagcaaaagccgttgtatgtcacgatggctagccagaactcgacgtctcggctcatgcccagctccaatcctggcactatgtataagctgagccacagcgggagcgggggcactctgagcgctgacaattcccggcataatcctggtgccagtcggactagcttggttccgaccggccagggtcaacaagatacgggttatgccacgttatcgacggattacgagggcttaggtcctgctggttacattcacgaggctgttgttccgcaacctccgcctgaatggcagccattcggctaccctctagcccacagtctttgtctgattacttgctactctgagggtgaagagggtattcggtcgactttagattctattgccatgaccgactacccgaacagtcacaaaacgatcttggtcatttgtgatggtatcattaaaggtaagggagaatcgttttccacgccagacattgtgctaggcatgctcagggagcctgttgttcccgaggacgaggtcgagccctactcctacgtggctgtggctactggctccaagcgacacaacatggccaaggtctacactgggttctacgactacggccataattcgatcatcccggcggataagcagcagcgcgttcccatgatggtgattgtcaagtgcggaactcctcaagagtcgacccagtcaaagcccggtaaccgtggcaagcgagacagtcagatcattctcatgtctttcctccagaaggttatgttcgacgagcgcatgacggaactagagtacgagatgttcaatggcctgtggaacgtcacaggcattgccccagacttctacgaggttgttctcatggtcgacgccgatacaaaggtgttcccagacagtttgacccacatggtctcggccatggtcaaggacccagaaatcatgggtctctgtggagaaactaagatcgccaacaagactgacagctgggtaacaatgatccaggtcttcgagtaagtctccactgtccattagcagcgcagtaactaattcaaaacaggtactttatctcccatcaccaagcgaaatcattcgaatccgtgttcggtggtgtaacctgtctccctggatgtttcaccatgtaccgaatcaaagcccccaagggcggccagaactactgggtgcccattctcgccaacccagatatcgttgaacactactcggaaaacgtcgtggatactctacacaagaagaacctgctccttctcggtgaagatcgctacctgaccaccctgatgctcaagaccttcccgaaacgcaagcagatcttcgtcccacaagccgtctgcaaaacagtcgtgccggacgcattcctcgtcctactctcccagcgccgtcgctggatcaacagtaccgtccacaacctatttgaactcgtcctcgtgcgcgacctgtgcggaaccttctgcttcagcatgcaattcgtcatcttcatcgagcttatcggaaccctggttctgcccgctgctatctccttcaccgtctatgtcgtcgtcgtctccatcgtcaagaaacccgtccaggtcattccgctggttctgctcgctctggtcttgggtctgccgggtgtgttgatcgtggtcactgcacacagactggtctatgtgctctggatgctgatctacctcctctcgcttccgatctggaacttcgttctgcccatgtatgcgttctggaagttcgacgatttcagttggggtgatacccgtaagactgcgggcgagaaggataagggacacggcgatgccgagggcgagtttgatagtacgaagatcacgatgaagaggtggcgcgatttcgaaaaaggtatgtcttaggttgccctggaatgatttgtcgattctaatattctcgatagatcgtcgtctacgaagtgcctggtcacagccccctacaacggatgttcatccatcgcagtacgagccttattcacattactaacgaaagcgtcagcgcttcatttcttatttgctttttcttgcttcccctgatgcacgtgatctattgtactatttacatatcggcgttcaaacattcttataatatagttcagagcgttacacgactgacgattgattatttacatatttttggctttcttctgtttcaagcatttgctgtcttgtacggcgaattggactgggcgcgttgtatgttaggaaataatcgtcatcctactggccatagcgtaaccaaaatagcatcatgaaccctgtcaaccaacatgaactatcaaatacgtacttctaccacggcttcccacagatcacgtcagcccaagtcgtgcccaacagcatccaagcgtgagtcaccgggctgtccgggttggatgtgcatgttacgtgctccctgcattattctaatattgacacatgcgagaatatatgatcaagacgatgcactttaaattagtttacgtgcttaatgcttaacccatgtcggatcagctctatgatcgagcgaggtctagaatggacgggacaacagttgactgaatattaggaccgaatccttgcatattctcgcgatgtatcatcttttgccattcgtttctttttttgccttccatgtatatattcgccccgagctcgcacgtttctctccccacgttccatctgactgcatgggagtgtcagaattaatacgaatccccttcttccccttatttgaacggaaaagcctaccgcgcactgtcctgttttccccctctatttttcttgggatcagcccacatctcgcactagaatagcagccgctataagattgccccgttgatctcgtcttccttttcccgctccttactctgcccctcttcggttgccctcggcgttttctcgctttccgctctccgctctccgccttttccctgacttggattccaacgccacgcctgcagtgtggggttgaactctagtcgagatcgctgcacgagaggacagatctggtaaatcctggaaaccgagacactgggtttctggttactggatttttttcctccgctcgtgcgaccgctattatcagtttcgggtcggatgtccatggcgggcgatgctccatcccgacaactgtaactctacgaatcgtccctccgactcatctgcccgctcgcgagatcccgctgcaccgccgcgtcatgtgttatatcctccagttcaaccccgagctatgaatcctctacatcgttccggtactggactgtctggtcgagaagaccacgcgacggcctggaattcgcctgatttcaatatacttcctaccgatcgatctgccccgcctgcgaatatgacctccgagatcgatcgccgcttccatgacgtgggtgtcgcagctctggctgctgtgtctcagtacccgcgtgccctggatactgcgctcggggattcttttctcgtgtcggaagtcgtcaacgctatcacgagtgcgggcagtcctcccgatcatcgacatttagatcccgtgggacctacgccggtacaatggggtaattttcaacctaccccttcggctggaccggtgtttgtcttcggcgcgaacccgagtggtaacacgggtatggacacatctgttcgggacttgattaaccgcaccgccggcgggcagaatatcgccatcgccccggacagtgacatcggggatggtcagaaggatatggttatggattatcagtccgctaccatggaagacaagccatcgcccgcagcaacatccgatgatgagctggaagactttctccagttttatcccgatgaagaggagtattactacgagcgcatggaccggccgacgcacgaaccccaaatgccagactgcaatttggatgacttttataacagcatcagttatgaagatattgaggtggatcacccaaacgtacctatggggaactacaccgacggtcagatggatttcgctggacctcaccccgcatctataatccacacgtcaagtaagacccaatgactgttgatacaggcctagctaattctctctagcatacgagcggaacctcactattgatgaattcatccagcgctggatggtctcgataaacgtcatcccccatgggttccattctgaaagtcgaattccaccgcagcttcgcccactctccaagatgatcagctggaagccgccgccggagattgttcggccgtctggatggagacgcgatttttacgatttgcagcagatcccgtggacagaaaccttgcgggtgacacggttcgatgcacgagctgtgcgtgacgcctggtatacttcgtatcataacttggattactcgcaccgtggctatgcaaatcgccttccccagcacgaaacctttttccgcgggaactctatgcacacttcacacaaagcgtctattgaacacttccagcttcgcaatctgatgtcggcccctgcatctaataccgtccatttcgcttccagctcaaaggtgttttcgtggaccccaaaaaccggcgacgcacgctgtataatcgacctgagccagcccgaccccgacttaggcttcctcagcccagtcaaaatatccaccatgaaaacagcgcacggcctgacaatcgccggcgggttttgcggggaatacgccctacgcagcaccagcggatccgaccctggcataaagggcctcgtaacccccgacttcaacgacggcatcaccaaccacatcgatataatccctagccgcaccggcccctccccgaccgccgtcttcgcctccaacgacaaacacctccgtatcctcgacaccgaaacaaacattttcacctccgaccaagaactctcccaaccaataaactgcaccgcaacatcccccgacggccgtctgcgcgtcgtaatcggcgactcaccggacgcatgggtcatcgaatccgacaccggccgacccgtgcaccccctccgcggccaccgcgacttcggcttcgcctgcgcctggtccccagacatgcgccacatagccacctccaaccaagacaaaaccgtcatcatctgggacgcgcgcacctggcgtccgctcgaaaccatcgactcggatgtcgcaggctaccgctcgctacgcttctcgcccgtcggcggcggcccgcgcaccctgctctgcaccgagcctgcggatcgcatctccatcgtcgatgcgcagctcttccgctcaagacaggtgcatgatttcttcggcgagattgggggtgcggactatgcgcctgacggcgccgagatatgggttgctaataccgatcgccatttcggtggtttcatgcagtatgagcgcaggatgtgggggcagcgggttgggttgacggatttgccgtgtgagtgggttaccgaggaggagttggcggtggatcctaggtgtgttttgagtaggagggagcgggggttgaggtttttgaggactttatcggatgaggagcatgatgcgttgattctttgattctcttatgactgttatgttgtctttttctttctttcttttttgggtggtattctttgcgccttttatctgcatctgataccctgggttgcggtgttggaggctatctatatttatttctttttttttttcttagagtattgtggctcataataatagttgtaactagtcgtcgcatacgttttatacttgctggtcacatgacatcacatctcggcgtatttattctccgattactaagcctcaaatatccactgcattggatacgtggacatcgccgtgtagagccaagaggaacgatactttggcaatttattttctgattgaattcattcaagttatcacttcctctgctataccactactcttctgtcagcttcatctctatcatctctatatcgtagttcctccatgtaaactccggactagaacacactgaaatcaccagatcaccagatcttccaagaaaaaacaacccaactcgatagtcaacgtctgaaacatccaataaaaagcccgctctggtaattggccacctcagcttcgatccacctgcaatgcgatctcacagcgaatcacccaaatcggcgcgatcaacaaaaaaactgccccgcaacccctcctccagcctcagctgaagctcttccattccattcttttcctctagctttctattaaatccatagcatatctccatttccacctttttcttgaacaattctatcatattcactcacatcctccattttaatccaaaatgtcttaccgcgataacaaccagcaatacggcggcggcggcggcagcggtggcggcgccagcgacagctactacaacaagaacgaggacttctccggcggtaacagcaataacaataacaactcctacggcggatctggcggtggcggtggctacggcaactcctctaacgagggccgcccttacgagggtcgcaacgagggccgcaacgacagctacggcaaccagaaccaaggccagggtaactacggcggtcgccaggagtcccacggtggcggaggctacggtggctccagcggtggctacggcgataacaacaactcctcctctggctacggcaactccagccacggcaactcttcctccggctacaaccaaaaccaagaccaaggcagctacggcggtcacggcagcggaggcaacaacaactcctcttccggctacggcggctccagcggcggctacggcgacaacaacaactcctcctccaaccagcactcttccagccacaacgaccaaggcagcagcagcgaagaaagctccctgttcagcaccgctttgaaattcctcaaagaccgcaataccagcggcgacgtcgacgagcagaaggtcgctaatgcccaccaggccatgtacggctccggcagctcgtcgaaccagcagcacgattccagcactgttggtgcgggcgctgcggtgcaggctttgaagatgttcgctggctccggcagtgggggcggcagtgatggcggcttggataagaataagcttattcagcttgctatgtctcaggctgggaagttgtgggatgagaagagtggttcggggggttctggtggtggtgtggtatgttattcttgtgcttcttttggttgggttattgctaatggtgttacagtccggtgataagcagtctgctgtcaactctgctgccgagatggctcttaaaatgtatatgaagaaccagggtggctctggtggttctggtgctagcgggcttatgagtcttgcgagcaagttcttgtagatgtttcttcttgttgaatgtgttggatgatgtctggcatttgagatatatcttttcattctagcttacgccgcttttgaacaaacaatcttgggattagccaaaagaagataacagtatcccatatgagaaagcgtatctgtctagcgttcctggttacttgggacgtattacttgactgggggactgttggcgtcttcggaacaactgttagggttgcagagcctatgtatactcaagcattctctaacctttactcccaccgttttatatcaaccacttcatttgcaataatactgcatacctctcaattcgctcagtcatattctaaatataactccatctgtctcggccaacggtgccggcgacaaagctttatgccaagccactgatataccgcaacaagtaccctatcaacccagttgtcgatcctcttagacgagtaaagatcgtccgattaaatctcgtattcttaattaatcacttacagagtactccctagtgcattcacactatagtgttaataacccctggttgatattcggcaattcaattctcgagattgaaaacggtatataccagaataggggtgtccactatttctcttagtttatctatgaagataccttatgaaatacccaataaccactaatggcattggcattggcattggcattggctaagtaatcttccaggggccaagttatgcattgagcttatccccagttttcatgacataccccactcccgtcctaaccgtcaacgtagattcttcagcgacatgtagatcaattccaatatagaatttcgacgatgcatttatcgctagcgcgctatagacacggcatatattcttgagtgtccaagccgagcgaggggtcaagtatccgtgctatcacaactatgcaggaaaaagcctgcacaattcaaaatgaacagatgaggtcgtactagatcatcaaggaatttgttatatatactattccaattattttctgccttcctgtcattctagtatgtttcttttgtccaattaggcatcttcttaattcaaaatgctccttcaatcggcttcgagtttgattcaggaacactatatctccgtcatcgccacttcggtacgtttactacaactttattcaattgagccagtctaacatgctctgcttagattctactatcattagtctcgcatgcatactaccaaatcttcctcaaccctctcagcaaataccccggccccagactcgccgccacatcacgcatacctcaaatctaccataccctaaaaggcgacctcctcgaatgggtcaccggactacacaacacccacggcaacgtcgtccgcgtcgccccagatgaactaagctacgcaaccggcgacgcctggaagggaatctacgggcacgcctcagccgggaaaccagtaacagagaaagacacccgcttctacggcccatccttcaacggcgccgcagatatcatccgcggaaaaggccccgaccactcgcgtttccgacgcaacttctcccacgccttttcggaccgcgcgctgcgggaacagcaggctttgatttgtggatatgcggacgcgttaatcgacaccctccacaactcgatccgggaggatcccgcagcgaaaataaatatggtccgcatgttgaatctgacgacgtttgatatcatgggcgatttaactttcggtgactcgttgaatctgctggctgggactgggaattgcagttgggtgtcggctgtgttcgtcagtatcaagacgaactctctgcgcagactggcgcgctacgtcccttggacggcggtcattgtccagcggcttatcccgaaggaactgaagcagcagagtatcgaacattacgaggcttctcaggaacgtgtggacagaaggatcgatggcaactatgtgcataaacctgatatctggggtattgtcatgagccagaaggaggacctccggcttagtcgggcggagatgtatgccaattcgcaggttttcatggtggcgggtactgagacgactgcgactgcgctgagtggtttgctctatcacctcctgaggacgccggagaagatggagattattgtagaggaagttcgtgcgacttttgagaaagactctgatattgatatgagatctctggagcatatgacatatctcaatgcgtgcattgaggaagggttgcgcatgtaccctccagttccggttggtctgccacgcattgctcctgatgagggattgcttgtttgcggagaacatattccaggaaaggtattcattccgttgtgttttcgaaggttggttctaatcttggatgatcatagactgcactttcggttcatcattgggctacctaccacagtgctcaaaacttcagattgccaaatcagtttatccctgagcgctggattggggatgagttcgccagtgataacaaggctgcatttcagccattctcatttgggcctcggaactgcattgggaagaagtatgttttcgtcttgctctcgaatggtcctagctaatgatcgatagtctggcataccatgaaatgcgtctcattctggccaaggtgctgtttaattttgacctttctcttctgccggagtctgttggttgggacaaacagaaaactttcttcctgtgggagaagaacgatctgatggttcagctgaaggcgaggaaataagggcgatgtttgaaagaacttcgaatcttctattcagcattcacacattataggcatttcgaacaaattcgtagtttcagatggtcaaacccatctctaatgtactacaatttcaaggtaaagttaatatgaaaatcccgcataacagtgcatgcagttagccatatcactttgtcaagtacaataaatattgatacattttcgcgatgatcatatctgttccctgttttctatggaaacacgataacatgtcgaaatttggctgtgctgtccatgacaccgttgtatgcctgcgtgaattcgtccatcgtgaatacttttatcatcgccttcacattattggtggcagagtactcgatgcatttctccatgtctggtgcacagccgcaagcgaagccacgtagggtagcacggttcatgttgaggaggagattatcgacttggattggaccatccgtagcggcagagaccaaagtgatcgtccctagagaggatgtcagccaacggcaccacatcgcgaatggtaaatggaatggaggcttaccattcttcgtaacagccggtataatagcattgatggccttggaataaggcgcagtgcataggatgagattcgcaccaccaagagacgacatgtactcgacaacgtcgattttactcgagtcaatgtattcgcaggcccccaaggacaatgcgagatcccgtttagaagaacccgacgaaacagcatacacctagaagaaaagaccagtcagctatgctatagcaaataagatatcctctcctttacctttaatcctagtctgttcgcatactgaatcgcaaggtggcctagtcctcctactccctggacgaggcagatgtcgcccggagaccacttcgacgtgtttatggcatcaaatacagtcgccccggcacagcagagaggagcgagttcagcataggatgctgtcttcagcacatcctcggcaatgtcgatgatagccgtgtacggagcgtacatatactccccatgaccaccatctatcgtaaacccagtgtaatccacgttgcggcaggtccaaaactgtcctttccggcagtaatcgcactgattgcagtagccgccattccaaccaacgccgaccaaggcacctatggcgaaacgctccttgttcaccgggctttgtagtagctccgagcccacgccggcgatacggccgatgatctcatggcccgggatgcgcgggtactgaaggccaggccaggcgccatccttgacgaagtggtcggagttgcagatcccagacgcgtgcacgcgcacgagtacctctgtcggtgcgggatcacgcagctctaacgtaatgacgtcccaggtactctgaggtgcggcacattggactacagaatacgtgtcagaatgaaccaatgaatgcaaacataatgacaaaaacacgtacttgctctgtaggtcttggggagtgaagaagccattgttagttagggttaaataatgaattacgaacgaagcgtcgttgtagaatatagattgggtagagttcttcaattgaaaatggtggatatccctattttatagaaaagtttactattgcaaggagagaccatgaacagcacagaagaaatccgaatacaaagatatctccgagaaaaggcttttgttgtacggacgtaagcataactccggatcccgattacgaagacccatagcgctcagggttcaaaaccccctttagaggggattcggccggaggaaaacatggcatgttaccactaattagggcaaaaaggtgcatacaccttagcaaggataaccggtgtggaagcagcggacagttcatccaacctgtttattgatccaaccgatgaagataagataggctatcggtcacgtgactttgtcgggccacatcgtctcggaagttccgacagattcttgaggcctgaatgcctgaattagcaccgctctccacaccgctctggacaagttcaaaaaaatgaagccttcgggcctaaacaaatcccgtgacaatcacccgatttgatcaattagatcctttctagcatctaacattgaattgccgttttcagaatcaaactatgtatattactggtgatagtagaattaatttaacttgcttcggattatgtgatctctgaatagcttcatctgctaacatggagatacccggccgacagctgatcgaatgttgaaatgggaccgctaatttagctttaaggaaaatatattaatccgtgttaatccgcgtttcgaccatctatctgctccgagcggtcttggcgaaatatcggtggatgttgatagaataatgatattgtatgattttgattcgcgaaacggtatatattgaactgactctacaaaatgtaacgacaagggtagaaaaaaacaatgactcgctgacctgtacatgcacatgccacgggcccaacaaacaaaaataaaaggtcaacgctaagcgcagaaatgtccaacaccgcgaccgaccataaacaattactgctcactctaccactcatcgtcgtcgtcgtgtttgccctgcatcgcactttgtcgtgcccgcagtgcctcggccaaaccacctgccaggctgacgttcgatgcgctgttgggcgtgccgcggccgctggcgcccgatgagtcgtttgactgcatgctcacggcgctatcgcgcgcagtgggcgcgcctgcgggtttgcgcccggccatgttgggacgcttggccgggggagcaggagggtgaggcttgctctttgcggctgctgcagctccagcgccatttggaacagggctgggggtggcgcggggtgccatcggaggtgggggtggaacgggcttcggtgtgggagcgacggctacttcttcgaggtaggattcgggggtccatccttgctccgatgttgttgtgttcttgcacagccaccatcctagaacatgttagtatgattcaaatgaagtatgctatgggtacgtaccatttccttccttggacacaacctccacaatttcgcccttggtgatggaaagctcgttggcccggtcgctgttgtagtcgtacttgacctttgcggcaggctttcttgacgctggagggggtgccgcagggggaggcggaggagccctcatggagccagaagatctcactgagctacgcgactcgttccgagagtgcatggcggcggcagcagctgccatagactggggcacgatgcgcggctgaggctgagctgcagcttgcggtaccatggcaggctgtggggtagaccggggcagaggctgagcggcagggacaggtctgcgagcagcttgagacaatttcgaagggccgccaccggggccaccaggacgaagtagtttgcccgttgtgaccgggcgagcagcaaccgccttcggccgcggagtaggtttggagacagagctaggaggctcaccagcactagtgtggattgtgctgcttttgtagctgtccacgtttccggcacccggatctttgactgccttgacggttgccagcttgccaggcttcttatggtattcgatggtttctccaatcttcaaggtcagagagccacgcaggacattggtgagatgagtgaagaactcggttttgaagacacagtggattagcgggtcgggttcctgagctccaataaccagcgaaaaccagtcatccttgagattcgaggtgctgacactcttgatcgctccaaccggaacggttcgttccgctgaaatgacaagctggttgttttcgatactttgtgcaacaacgaaaacgtgacgattcgtcaagaccaggatccgcggaacaggtttgctagaacgaccaaacttagacaccaaaacctcggcacggcaagagaaaacaacatcatctgaaccgctgatgcctgcaccattgcggatcatttcaccaggaccaccggtattgccgacaccaaggtaatcacccaggaaacgacgagagccgagaagactcattctccgacgttccttgcgaccctggagcactttgtgtccctggtcacgaatcttgatgaattcgagtccgccggtcatgcggcgccagaagcgctggatacggatcgcacattcaatacggtaccggagatagtttctccacgcacgttgaatgcggatggccatattgtgccagtatttgtctcgcatggcttctagtgcgaatagtgtctcgggagtcttgacgaaaacctttgtgatacccatctgatactcctcggcagggatgcgggtatccgtcaagatttgcttcgcgccggattccacgtcaccagtccatgtgtagtcaccggcataggaagtcttcggggacaacaggtagaatcgctcagtgaacttgtcgaaggtctgacggtaggcgaaaccagcacgtcgaatgcggacgttttcctggagacccaggtacttgatctggtgcaggacattgccgacgttgaattccttgggggccttgttatcgttgggtttgatggtacgaatgtaagatggctgcgccttcatgagcgtggccacaaggtcattcgcggatgccttgatcttgtcaccggcggtaggtgggcgacgcttgtcatcttggttgacctcgttggggaacagcgcgtggacgaattcgttgctgctagattgggcaaggttcaacaagtccttcaacagctgatccttgttcttatctgtcattccctccacggcgtaactgacatcaccagcgtagtgcttgatgatgaactgcccctggcgagcttcaaagttggggttctgggccaggaagttgagtctgccaacgaaagtctgatcggccgcaccggaatcggcgtgggcagttgcgcaggcatcattcaaagcggcgaaaacaccaggagggcgcttgtcctcgatcaacgagcacaccaccttgttgtcaaagtactcgataggagtccacttgatctgctcgcgggcatactcatcttgttctgccttgagagtcaattgaatgaaaatctgctgcagtttttcgttgacatagttgatacacagctgctcgaaagagttcttctcgaagatttcgaatccgtaaatatccaggataccaatcgaattagtgatggagcctcgagcagtcagtgactgattgacgcgctctacaatccaatcgaacagattgaagtaaattcccttggccaaagcgtcgcgaacggctgaagcttggaccctgttcagcggcacttcgtacacagaacccctgcgccctcctcgggcagtctccatcagacgaatagtcaacgctttgttcacttgagcagcatccacctccagcaggtaggcgacaaagtcaacgattgactgatcgctaatagcagcgttgccagagtcatcctcggtgaactgaacatttccaatccagagaatagccgctagcatgcggaacacattgtcctgctcggcatcgctcattccaatcacccgcatcgcatccagtgtatccttgaactcggcaacatcgtcgattccgggcacatcataacacttggaacggctcgtatagaggtaagattgtggttgctggagaccgaagctgtcacggtacttttgtggggccccctttgtgagttggtaaaagatgtggaaattacgctcattcacaatttgtcccacaactcgcgacttttccagcagataatttgtaatgttggctcccaccggctcaccgttggcattgaactccaattctaggtattttccgaatcgggacgagttattgttgcgcagcgtcttcgcattaccgaatgactccagcaacgggttcgtcgccaaaaccatttccttggtctgttgaatagacgaatcgccgccgccggagacactggcaatgtattgcatgatccgcttcgcggcctcggtctttccggcacccgactctccagaaatgatgacacactggttgtccttgtaagatttcatgttgtagtatgcggactcggcgactccgaatacatggggagggacttcgagacggttcttgccgcgatacgaatcgaggacactatctgtgtagatacccactgtagtcgcaagtccgttagcaaggaggaaaccgaattctctcggcggagcaactcacagtcccggaaaggatttactgagaccagcacatggccaatataagtctggaagtctcctgtcagcctgtattcgtgttcgcgcacaaccccgcagcccgcgtgcaagagcgatcccttacataaatctcgtcatgctcgaaccggagcttcagattatcgttgatggcctcattggagatcttgctgagcagcgtgagatctgacacgccgatctccttcttcttgctgctctcgaaggcggccttcctgaccttcggctttccccccgcttgccggccatcgccaacatctgcggctgctttggagcgcccgaagcggctcttcttctctccgccaacggggcgtcgtgactgaccctaaaccgcaatcccagggtcagtttggtccttatctggtcgttgcgcaagtaggccacctaccatcttgtgtcaacctctcggggatctcgcgcccaggcgacaatgtgcaaatctaagtcaagcaaatgggggaattctagtgacaagttgagattgaggaattgagagtgaatggaaacagtctagaaccaattcaaggtaattgtaagagggaagtgcccactcggcggacttacgtacaactggtcaaaccgaagcaaacagctgcgccacaaaggaccctttttctggttccgtcgctgcctcaggggcgaattgggtatcaatttagccgcctgcccttagaatgatctttttgatactattcttattgatctattgaatttttgtcgatactcctttttcttgaacctccttggccagccactcacgtcagggcatgtggctaatgttaagaataggtgcacgacgtcattgggcatatatactgcctaaccaatttcgattgatatgcccagaccagatgaattggagccatgaaattatatatgggtctactcgatttgcatgtaatttcacttatcgttcttaactatgtagcttcgagtctgagagaccgccttgctggttgccgaggcatggtaacggtgtcggtatctatcttgacgcctgtaacacatcttttgtattctcttagattttgcctccgtcccatagctggcttcggtctcggcaaagactgcaccggcggctctgggactgtataactggcccgccaggtttgatggtgggcattgacttcgttctagaagttcaatgaatggcaaagacttgaagataaaggtatgatagcgatagaggggaataaaactgttgattaagttcataactatccatattgttcagagtaacacaccatcggggctcaacctcttccgtaagacttatgacggaaaaaaaactagcaccaacaaactcaatctgggagttcacttcttatcctgggatgaaaatgagaatttcgatggctggaacggcgagggtgggaccgacgcgggtggaaccgatgcggctggagaagatctggattggaatgatgtagctgcaaaggatgcaggtacaagcgcagtcggtttcggcaacacatctgcggtgttgaccaagatctaatcgtgatatatgagcaaacgaccgaactaagacttgtcatcaggcactcactggattggctcgggagacacccttcatgtaagcacttacgcaatccagaaggtatgatgcgtcggacacaacaagaacagggggtggctccgagaagcccaaggaaaggcagtggtgcagtgcgccgagagactgcactgcctcgatctgctcgttaccggacgatctcgcatccattaagtacatgatgacccccaaggacttcttgttagcttcggtgaacttctggattgcagtcgcagtctgatgtctagtggttacgctcagccggctgggggtcaacaaaagtgcattgagcttgagggagtgagtctgatcgagtacgtcaaacttcgatagggttcggctctggtagattagcttgaagctgaagtcggcatctcgagcagcccacaaagcttgatgagatttaatggttggactttttgtgacggagtcaagggaacttacaactgaaatctttcttggagggctccggcgaggctagaagatacggtcagctccacatgttgactcaatggatgagagtactgtaccttctttcattgtttctaatgcagtcagggtggtggccagcctggcccattcatcacgtttgcggagttctgggttgtattcaccccgaagaccgagcgttggcgttgttggagtcattacgacagtagagaagagagattgtgtactgtcactgtcgctcgtttgaggatggaaatggagatgagactgccagaaagattgagtagagagaaaacctgaacaaaaatggaattgtcaggcgcaaaagaatgaaagagaagagaagagtggttgcctctatggacgtgatgtgtgtatgtacatttcagggaaggagcggaatatcaagtgactccgcctcgcaacccctactctctcgaaaacaaaacaatgcttgtgatatttccagtggtcttttctatggggtatcttgactgaatgtaaaaagcaaatgcacgcctaaccttatataataagatatcgctaggatacgagtatcaatcaacaatcacgagcttttcgatgcaggtgatgatgtcggactggctgatgcagagtgttcctgggtttgggatgtcgatgcagccttttctgcggtagccctttctgctgtaggctgggtaacaggcgcaggctcggccgtctcctcggcgcgttgaccgaaaggaatgtacgaggcaagtcgtgagagccacccatgtacgatgtccggcgtatccgactctccggcttgttcatatatctcaggagacagaatcctcttcgtgtgcaacttaggcaagtcactgtgcttcgctctgagctgcagtacctccttttctagtgccagcagagcttcgcgtgcggcctgttcggattgttctagatctgctagtcttccctcgacgccttcccggcgggtgctttccttgctccgtgaccgccatgactcaaataggatcagacctccagcaacaaggaagaggaaggactcggagatgaaattggcaccggactcgatagctttcgactcggagaggggacggatatgatagtgttgaggcttggccgcgtcttcagccgcagccttggccttggcctctgcctcctcggcggctttcgtgtcggcggcgttccgaacggtggggattgaaagcttgtgttttcgcgcttcggcggcggcgatggcttgacgctgtgaggcggcagtatcgcgcagggagcctagtctaagacgcatatcgaatcggtgaagagcctgggctatagacacgcagatattgcgaaaccgttcatgttcgcgggcctgggctttaatttgagactgcgtgggtcagtctatgaatatggcaaggttggactgggatgcaagcttacagcgatgggcttggacagggtccggattgccaaggaggagagcttcagagtcaacgacatagctggagaatagagagtgaatacatgaggcttgagtcacttccttacctccgtgttgcccgtggacccgcggacccgcgttgattactcagcaccgccaacaccgccctggagcgatcttaggcttaatttcgatatttgcttggcagcgacaacagctgagattcatgcagttgatataatactccgtgtatgtcaaactactgcattttacagtcccactctttaagagagataaacagagccagtaatttctcgacatcgcacgggatgcagccaccctatctcattcatatagggctagcctgtcaggccaaatgtggcatgtacaaccgttcggagagtaaacaatgcacattctatggcctgttctttctgtcgcaatacacattgcatcctacaagcgcgccatcctgcagtaatcagccaataaggatcccagaataatgccattccaccaaagttacccccggaccccacggtggttcggctgaagcgacgttttaatataatttccttacgcgagacctcggatttaaccccaaactaggcagataagcaaaaattagcctctcctcatcgaccactaaaatggtgtgattgctttatgtagtatttggccctggaaatgttttcgcctttctctttcctgcaacgacgccatggcaggggtattcgaggaaaagagctctaagacagggagtcagtacgtcgtgcacaattttcacgatgtggaagatcaacccttcaccccacaaggtcctttgagcgctgccatccccgacgacgggcagatcgttacccagaatgaacgccaaagcttgatccggggtctggggcagcgccatattcagatgattgccattgcgggcgcaattgtacgcaaactgtttattaggattgcaactttgtgactgacctaaatagggtacgggtctctttctcggtctgggtggctcgatcgccaccggtggtcctctgggtgcccttttaggctacatgttcatcggcctgatagtctgctgcatccaatttgcgctgggagaagtctcagcgctgctaccagtcaccggttcttttgtgcgacatgcagagattttggtcgatcccgcgctcgcatttgcgatcggctggaatgtcgtttatggatgctttctcagcgttcccagtgagatctccgccagcgtggttcttattcagtactggacggatatcaacgccgccgtctgggtgactatcctcatagtggtgtcggtggtggttgccgtctcgtttattggcgtctacggcgagattgaatttatcttcgccattctgaagatcctgctggttgtcttcgtggtcattctcggtcttgttatcgatctcggcggtgcgccgggtgtgccccgacgcggcttccactactggaaagaccccggcccgttcgttgagtacattgccaccgggtcttggggacaatttctcgggttctgggctgtcatgactaatgcagtctactcgttcgctggcgtggaatcattagccatggccgccgccgaaacgcaaaacccacgacagaatatccccaaggcctgcaaaagggtgttcgcacgagtctctatcttctaccttgccaccgtcttgatcgtgggcatgttagtctctagcgccgacgaccgtattagcgcagactccggcacggcggccacgagtccgttcgtcattgccgccagcgacgcaggtatcagggctattccctccgttgtgaacgcagtatgcttgagctctgcgtggtctgcatcgaaccagagtattctggccggaacaagaactctatatggtctagcgctcaagggccatgctccgaagatattcctgcgcacctccaagtggggagtgccgtacatgtgtgtgctgctgcagatggccttctctctactggcttacatgtgtgtttccaacgacgcaatgaatgtcttctggtggttcgttgatttgactgcggctggtaccttggtctcgtggattgctatcgctttcaaccatattcgtctgatgcaagcaatggataaacagggcatatcgccaacagagttgccgtggcataaccgaattaccagtatgtatcagtctggtttcagatcagtcttgaggttctaatactgaccttatcaaggatacacaagctggtttgcgctggtcgcatgtgtcataattctcttcactggaggattcacagtcttcacaacaggaaactgggataccgcctcgttcatctcgtcgtatctgtgagttttcttctcgtaccattgagttcgatctgctaacattgacactagggacattccactcgtcctctttgcgtacggggcttataagttgatccgccgcacaaatattattcctctaaggacgataccggttcaacaagcgatagacgaggccaacaacgacccggacaacgtgccgatcaagaaagacagcatactggcaaagatgaatattttctggggctgacatatctcctatcatagctagcagactagcctttcacttaataacataataacaaccccgtggcattgtgttttgctcccgttgttctatgtagtctcatgtaatcaatatatacatgtaatcctaataccccttgccccgcgtataagagttaatcaacggcccaccccgcgcgatacgctccagatttagctcaaggatatcaagcgagcgcgggaaatactccaccccaagcgcgctgacatgcggactaatctgaacattggcagcctcccagagcggatcatccttaggaagcggttccggatccgtgacatcaagcgcagcaccactcaaaacccccgaattcaaagcatcgaccaaagccttctgatcgataaccctaccccgggagatattagtcacgtaaggcttactcgaatggtgctgagaatggtccgagagaatggtgaattcctcggcaccgaggagacggtttgtttgcggtgtcagcggaagtgagaccaccagatgatcgagcccggtagccaggaaagagcggagggattcgcggtctgcgccgtgatgccacgatgccgggatcgagccgtcgggatcgcccgtgccgggcacgatgtagccgttgtcacgccgggattcgggtgttgggcgtggggtggccgtgtatgcgtgcacggtcatgcccaatgcttgcgagacgcgggcgactgtcgatggttaacttttggtatcttgtttatggaatttccagcgagtggatgtgcggaaacatactttggcgcccgatacttccatatcctagaatacctacctttttacccacttggtcatgaagacctggcctatacgcggccttatcccatacgtgggatttctgtgcctcgtagcccttggcgtatctccgggatgataccagccaattcatcacagtccattctgcaatcggaggaccatggatacccgagcttgtagtgatggggatatcagtttcttgcagaattgggttttgcaaaatatgatccacgccagcagagaaggtgtggattagtttaagactatagtaatggttaatacatagtaggaatgattgaggtaggagcttacttcttcgagtccttgagatcaggaagatcgctgaaagtcgcgaggacagtggccttttgatatacctctgcgcgagtttagtttttgtgacctcgattttcaagaatgatagccacttaccagatggcacaggagttccctgagactcgtagatagtgacctcggcatgggagaatttctgtaggataacctccttcacctcttctggcatcgtcgggtagaaaataacgagcacatgctccggtgacaatggcgcgtcgcccataattgcgatagatagttttcaaagtgtgtgaccaaaaaagaggtttggggctttaaatgggaattctcacagggcgcgggcaatgttttccttatcttccccgcctcggtggctcaaaagggcaattcggcatctccaaggctaacatttccttataaacggatcggatggcggtttcttattggaatttggggagatggtggtggtttatgccagatggcgtggtatgacgacactttgattagatatggtctcagcgcacgaattagtatagtgcgaggctttataataagttgaaggagctttctagaacaagaatgacaccatcaacagaaaatcacatctttgatatcatttctactggaattgagtttgtgcctgagtgctagctacaccaggaatacctcagcctcctccgttctggtcgaaacgagtggtctactaaccggactcgacagtgttcgcctacacaaacgggtcaagataatttacgtttatatgtgtcgatgaatgatcttcattgtagacatacttcacgagccttggtatggattatatgcgcatacgagcccaaacgcgtcactcccatggaacgagcatctttagatagccacaggaataaatggttatcataagcttaatatccgcggtgaaactacatgcacgaaattgcctctaataatatactgtcaggccccttgtcttttacaaagaagcgggtcatagacctgcattcctatactccgtaaggagtactgtcgctgtagaacctcagctttctccaccccactcggcatagcacaagacctccaatttcaactccgatacaaaaatcaattcaatacacaacttaagccattggataacccatctcactacatcgtcacacgcaattttcaagcccaacctaagatgtctctggaaatccaccccgcgtctcccaaggacgcgcccgaactcgcgcaagtcttctacgccagcttccgtaccgactgcgacaaaaccatgttccccaacacgccggacgtgacagaatggttcgaacgcttttttagcgccgacatcacgcgctcaattgaaggcgagacccgtgatgtattcctcaaggtgacggaggggtcggaggatggcggggatcggattgtcgcattcgcgaaatggaagtttcccgtgcctgcagatcgcaatcggcatgaggaacagatcgtgtggcctgctagtagtgataaggaactatgcgatcggtttttcaatggtatggaggcgcgacatgagaagtggatgggggagaggcctcattattgtacgtttttctttttcttcttcaaatctttgggtttggtatttctcgagcagatacgaaggaacaccactaaccgttatagatctggatatgttgggtgttcacgcttcctaccagggcaagggactgggctcgagactccttaaatggggtctcacacgcgctgatgctgaaggcttggaggtttatctgtccgcgtctccggctgggaaaccgttgtatcagaaatatgggttccgggaggttgattccttctcgccgtaccccgattacgcgcaggtggcgatgatacgctcgcctaatagtcaaatataaccggattatttcaggaagcttagcacgctagaagtagaaaaaccgggacttcaaagcaaatcatcatttatcgctgcgccatgtcttgaagtctcttgtggtgtttaaaaaaaagaaattaggatatttgtgcgggatctatgtatacttattgttcttcaacctaaattagcgaaaaaaaacaagggtgtggttaatatgggcaagtacgttctatcggccgatctgcagaacttttgcggccctcacatattcttgccatctaatcaaaatgacatttcgcatgacgcttttagcatttccatattagattccttcaatttaaaaagaagaagaagaaaaaagaatgggcccgagcccgggatcgaaccggggacctcgcgcattaatgctttgggttaaccctaagcgcgaatcataccactagaccacccgggcagttgatagaataaggttcaggactggggcacaaacatggagagacatattgaaataccaaaaagagatattatcgctgctttgaatatcaattgctttgaaaaataacctaccgacttagggtgaggaagctcaagcaggggagcaaaggtctgccctagcaatggaggttggacatagagagaggaggttgcgggcatcaagacatcaagacatcgagagatgaagtgaaggtggtatttccttgaaccagaaaacaaggtccgggctaaagagtaggggtccggtatgatattatatatcaaaggtgtcatatatcatctccagggctccccaagccaagaagccgcttataaatccaatattgggtccacttcaagactgcggggtataagatggagagatcaaaacttgttcttttttgattggaaagcaatataaaacgtcatttccaaggctatctaaccccaagtatcttgtgtctttcattcaaagtattcaagtgaacctgtaacgccgagcttcccactttcatccccttggatatacaaaatgaccaaattattcatgtgagactctatctgaatataaaaaactaagcttctaacaactccatagtaccggtgtcacaggctacatcggcggtgactctctagccacacttgttgccaaccacccagagttctcatattccgctcttgttcggaccaccgaaaaggccgaacaagtgaaggcccagtacccatttatccgaatcgtaatcggagacctggatgattcagctttactggagcgagaaagtgccgccgcggacatcgtgctgcgtaagtatccaactcgcccccgatgcgaggagcatcctatccgcattctgctaagcctgcaaaacagacactgcagatgcgtcagatcacgtgggagccgcgaaagccattattgccggcctggtagccggccacagcaaggaaaacccaggctacttgctacacaccggaggaactggtatcctgtcctgggaggacagcgacaagaaagaatacggaaatagaagtgagcacgtgtacgatgactgggatggggtggatgaactactcaatctgccagatcacgcattccatcggaatgtcgaccagctcgtcctccaggctgcagcccagcatgccgatgtgctcaagacggcacttgtttgtccgcctacgatctacggtacgcatttccagcaacggaaagaaagaaaccatttacttattttcagcaggcaaaggaagaggtccggttaatcaacgttcgcgccaggtgtacgtattagcgaatgtgacgctccgtctcaagaagggcccgataatcggtgccggccagtcactgtggaacaacgttcacgtcaacgacctgagtgacgtctatgctctactagtcgacgcggcgattgcgggccgaactgatgacgggctctggggtcctaaggcctactaccttactgagaatggggaacactgctggggtgagctagccaaagctacagcagaggcagccacgaagctggggtacctgccagaggcaaagaccgaggtacttgaccctgttatcgctaagcagtatggaggatttgagtctcttagttggggcatgaactctcgtggtcgctcacagcgggcacgcaagatcctgggatggaacccttcgcggcctagtctggtggatgaactaccggagattgttcgtggcgagtgggagcgactgcaaaatgcttcctagagcagtcgtttgacatgtctcttctttgtctcagagcatgttgattggaattggtgggtttgaagtgaaagaatgcggggtgaccccgagagtttgctgggtcttatatcccgatcagcatagaatgggggatttgatgcgagacctagctatttaaatgttgaccggggacatttcaacttggctagagccagatcttcagaatcgagacatgtttcacccctcgacaatcaagcattatggcttgggctttctagagtggcacaagtgtaaataccagactcgactcgagccctcgagtatttaaagtctggtctcgtataataaggcgcagcagcgttttcagccttgtataagccagccggtgtagggatagtcgggattgagatcccatcaactcagcctgggacaatcataatcccgaccagcgggccgcataatactaaaagaggaaggagacaggactgatgcataatcatggtattcatgcattcacccggccccgactggtgagacggcgaaatattgcgccgactgttgacaagccaactgggctgatgcagccaatgaatgctagccatatccaacccaatcagagccatcctagagacccttgagactaatctcgcgattataacgcgaggattcaggttatagccagcggagtcggaaattctggatcacgacggagcaatatttcgccctgttctaaattgtatatgggattttgtcaattccgcgtgccgtggacatgtgttgtactcgatgctgtttatctatttaccatgcagattcccatttcaatttcttttttttttcttctctagtaggagcttatacatttattaacgttccactcatcttctgatcgctagattgccgtcgccgttgatctatcgccatggcggactcagatttcccattctatagacccgcgaggtccgaatatgccgataacacgagcagagcatctacagacgtgaaacggaaaaggaatgtcgatgaggataaatttgctttgggtcggggaggaaaactagtcttctttacattgtctgttctcaccttgatggccgctttggacggaacttcgctgtcggttgctttacctgtgagtgcgtcaacaaatgatttgatatgttgaaacttaccaggccaggaaattgcaaaagagctcaatggaacggctattgaagctttctggagtggaacttcgttcctgttatgctcaacaggtatgtggcaatatgttacaatacgatcaaaccctttaaccttgccatagtattccaaccgagtttcgcctccttctcgaatatcttcggccgtcgacccatgatcatgatctcccttatatttttctgtgtcggcgctataatcgcagcaatcgccaacaatttcacctacatgttgatcggtcgttccatccaaggtgtcggtggaggcggtcttatatccctaagcgaggtcatcataaccgatctcgtccctctgcgatggcgtggtcagtacttcggtatcctcagtgcaatgtggagtctcggatccgtgacggggcctatcctcggtggtggattctcggaaaatgtgtcttgggttagttgagctaatccatttaagctccgcaagtatttatgctaactacgaatagagatggatcttctatatcaacttcccattcatcggagtcggcgggattctcgtcatcctattcttgaacctcaagcttgcccccagttcattaatcgacaagctccgtcgcatcgattatttcggtaccatcttgttcgtcggaagcgtgtcatccttcctgatccccctcagctggggtggcatttcatacgactggagctcatggcacacacttgtaccgctttgtgtcggaggcgtagggctggtcgttttcggattctacgagtactacttcgcctctgatcctattgtcccgcctgtgatattccaaaaccgcacggcggtagcttcgttcattgggagtgttttgcaaggcttcatcctatggtgtgccctctattacctccctatgtactatgaggcagtgaaggagtacagcccgattatctcaggcgttgcgctattccccgagacattcaccgtggctccgagtgggatggtagccggcatcctgatcacggtaacgggtcgttacagatgggctatctggctcggatgggctttttcgactgtcgggctaggcttgatgtgtctgatcaaggtggagaccagtatggtcggctggatcttcctcaatatcgtgcctggccttggattgggcattctcttcccatctctcggttatgcagtgcaggcctctgcggacccggagaacctcgctattgcggttgccatgtttagtttcttccgtgctctcggccaggctatcggcgttgctgtcggtggtgttgtcttccagaatcgcatgttcaccaacatctccaggtatgctgatttggcgcctatggccgaggcgtacagcaaggatgccgctggcttggtccaagtcatcaaggcgatggcagatggcgctgataaagcgaatctcaaggaagcctatacggacagtctacgcacggtctggatcgtctgctgtggagtgtctgctgtggcgatggtgataagcttcctcactgagcattatgaccttgaccgtgcattggagtcgaaccaaggacttcgtgaagaggatgatgatgatgagtctatcaacagtttgaaggacttggagatgcgggcagaccggagaattgtcacggagccccgaccttgggcgtggtagtggaagtttttctgacatgattgatggagatctataatgtataaagtaatgatatttactgtattgaagttcattcctagtacagactgttctcttgagcaaagtcttgctcccttcgtctctcccttcgtctctccctcgtagtctagtgtatctattttcaataggtgggattcatggacaatatatacatcggtgggatcttcgattaccggtattggggggggggggttcgaatgtgccgtgnnnnnnnnnnnnnnnnnnnnnnnnnnnnnnnnnnnnnnnnnnnnnnnnnnnnnnnnnnnnnnnnnnnnnnnnnnnnnnnnnnnnnnnnnnnnnnnnnnnnnnnnnnnggggggggggtgtgggtttgcgggggggggggggggggggttcgaatgtgacgttgccggggctcttttacggctagatgcgcgggaaagcttcaataaggaaactatacaatacgcaagatcccgaggagcaagcgggtttaaacatacggattagaaaggacggacgccacatgggcagtgatacgagacagtgcaagacatgtacatttctgcaagtagccgaaaaagaaaaaaacgctgttatacaacgatatcgacaacctggaagctgaacttcaaacattcgtgatcacatcccacaagaataaacataaaggatcacatcacagaaacaacaacgaatggtcgtgacatcgtaaagtagccatggtaaatagcagaaggagtaaagagattggatcaacgaccaagtgcacgtagccggtctttgagtagctgcatttctttgtcatattccatcccggcaggctttgtcacccggttattatctttgatcatcatagagcggtagcgaccatcgccatctggtgctccaacagtcacccagacaaacttcgttccggagctattgggctgcgaacgctcctgtgttccttgccagaatgcttcgtcgggtacggattcatcagcagaagcggggtcaaccgagggcgcacgacccccaagtcgcccgaattcaatccaaactctgagggtatctttgatgaaggtgattttctgcacgaaggcgttcgcatcaaggatgtcccggatgcggtcttcggtcgaattgatggaatctccgcccgcaatgctgaggaacgtagcagcctcgtcggaggccacagcccgagtgtcgaatcctgctgggtgcatcttgccttttgcggcgaagtatcgagcggcggaggccgagagatggtagaagtcgacccagggggatgagctacgggtgcggcccggcgagatcactagctttgtgtggtcggggaagttgaactggaaggcaccatccccaaaaccccagatgccgacattgcccaagcgctggtagaacttgacaaactgggcactgttgtgttgaggtagatcttcatccataatcccctcgtcgccatgtcgaccaagggctccgatcatgtatttaccgaactgatccacaagtttcatcctcttgattttctctgcatcggctcgttcaatctcggttcctgtgttggaacgaactctcattgccttcgagcttttgacatcgaacagtgagggcgatatcaaagctcgtcggatgccgcggcatcctagcagatcatcgtcacagttctcataaaattcaaccgaggttccagtgcgaggaactaattgatcagcctcggaatagtaaattggcttttgcttgccatccacgacgctacgggcttttcggcggatatgtctctcgccatctcgaagcacgacactcgttgccggctgcccgttttctgccttgaaaacacatccaacgctgccatcatctagaacatacccaataccataacggttggtatagtcgacccatttgatgacataggcatggggctgttttcgtgctccccctctgcgtctacttggtgcgtggtcgaccaggttggtcagcatgagacgcaagtcggtgttgacatcggtcaacgaagtcctgggtagaagcttgcagacatctgctgtgtgaaatataggactgagccccaagctagagcgggctctagtgccagccgtcttgccgtcagaccgagcggtaccattggagtttgatcgaccatgtccattagattcagaaaacttcgactgtgccagtgaagatgggctggctctccctctgtcgcctcgtccagcagtagtgttcagatctgctttggatatagaccgtagggatttctgattggcgatcacgtttcgctcctccagcctagcggttggttgtcgttctctggttgaaatagaaggctgcatcagctcctggtcagcagctgccaatctgcgagactgagagcgtgttttgcctacagtcaagcctgatggcatgcttgtggatttggctaatcgtggagcaatatccttgtccttgctacgcagcgttgctgtcgctgtcgctgcttgggtagcggatgccatccttcgtgtccggataggacgctctgcgagccctccaattggcacttccacagcgggcagaggttttggctcggcttttggactatctcgatatggcctggaggacagaacagcaggatcggggactacaggtgccctccgaggagagataggtggcactcgagcttgctgtcgtagcgttgcggcatggctttgtccttccattcggcgatgttgagcagcgacgagagcggcattggtccgtgacgctgccatagggttgggacgagcagaaatactccgattggacatagtgctgcttttaagcatcgactcctcagggcgcattacctttcgggacgtctccaaaacacaccagtctccatccaggtcttggggccatcggtaaacataatccggcgacaagggtattacgggtcgcagacctctggagtcctccacatcacactcagaaaaggccgactttgcgcaatttctgccaacggatttccgagccgtcccgtcaggcttgcgtcccacgccgcagagtgagtagaaggccgctttgcaggaatgatatcgctgagcggggtcgtccacctggtacacgtacgcgcggagcttctcatccgagtccaagccgtacccatgtaccacagaatcgccttgaggtgaagcgtccctgagccatagtggcttattgaatcggcacgaggggtctagttgacgaggaatgcaaccctcatacatgttaaagaatgggtgctcaacaatatcgtctgggtctggtcgctcctcgtccaccaggttcaagcaacgactgactagatcttttgcttcctcggggatgtagttgctggactctgattcattaggccagacgtaagtcagattctggacttttttgtaaacttcatcttgggttttggattgaaagggtaagtatcctgcgagcatggcaaagctaaatgcgaacattagttcaacgacttcctagtaatatcgcggtgttcttaccatattacgcccacggaccaaatatcaactttctgtgtatgcccgcctttgctcttgtccaaaacttcgggggcgatatagttgggtgtgccgcatagcgtgttccgtcgcttggcatccttgtcggacatgatcatagccgccagaccaaaatccccaaccttgatgttcatgttgtgatcgaggaacagatttcccatcttcaggtcacgatgagcgacgaagcgtttgtgtaggtatttcaccgctgcgcaaagctgaatcatataccggcgcacttctggcaagctgaaacagcgtcgtttccgaaacatgtccatcaccgagccattgggacataactccaggacgacataggtgctggatccgaaagcgaatgcacggtagaactggacgataaaaggatgacgcattttagaatgaatctggagttcggttcgaaactgcgacaaaagtttaggcactgtcaaatgcttggtccgtatccagaggctcgtaccttctcctccatctttttttgagacatcgctgacttgacgaccttcatggcatacacccggccatttcgagccagtgtaccctcataacaaacagcgaaaccgcctttccctaagaatgcgcctatcgagtatcgctcaccgccatcttccggctctgagactatcgacggtggcggatcggcgtagcttttggacgttgcaagcttctgcttgttactcggaggcggggcatttttatcgaacggtttgcgatcaatcgccaccttcggcttgatcatctggttcgtcgtgcgcggggagagggcctccatgattggaaggtcttcttgttatgacaggcgaaataggagaatatcaccagctgaacgcgtgtaacggaaggggtatcgcgcataaagatcattaaacagtgaccatgtgacggtctgcaaaagggtatcaagttcgggcaatattggtatccctgcaacgaccaagttagacctcagtggagagctgaacacagatagaacttaccaaaatgcaaagcgctaaagaaacagaaatgtacaaagcttggaaaacaaataacgacacctcaatcgagggttggggaaggatggtgaataaatagtcggaccataacagtttgctcaacgcggtaaacaataaacactggccgttggcccgtgtggtgtggtcacgtgagccccgttgccagcgcattgtcttcggtagacacatacccacatagtggacatgtgtagatttgtctaaaaatatgaagatattcgatttagcaagaaactgtttggcttcaatctcgatgtgtttctagggctttatattagggttgacaataagaaatgaagtacataaatctcagccgcgaatttaactttacgaccacgaagtactgtacatattatccttgcacttttattggctcttaaggttgcggctatagttctcttgaagttgatcgaaatggggtttatccttagcttccagagtatatcttactgttgtatacatattctctatactaaattatcaacaagcctgactccagtggcatttcatgagaatttgccccagtacttctggcattgaccgctctttccacaccgccgatctattcctacaccccgcgcagggcacgcgtgcgcgatgatgcgcgtagtatagtatgaagttttctattggcagaggaaaagcgggtctcgggccttcccatgtacataccggggtgcaaaccctggaatactaatgaaatatgactgtacagcgggagatcgtacataaaccttctcaaaagcttaagcttaatcttacctagtatgtaagttgtacagagtatctatgtaaaaactcgcagcctatgcagcggccaggtcccatggaaacggtttgagaatatgcaggtctagagttcagcttttactaaagtggatagacaacaaccaaaaaggggaagcccactatcccaacgggctggtttatgactaaatatagttaaaatcatctcactgcccacagatttcggtatggatagataggcaattcagcaataatgttgatatgtggatcaaatcctgatgtttagtctccacaacccagccatctaggtacatgtcttactagcatgtcgtcattatatatcataaacccctctcagccattcctcggccaccacgccaatgaaaccgctaccaacaacggccaatgtccatggattcgccaagtcccgcaaatttggccagaaactatttttctcttcctgccactgttgcagctgcctatacttatctgaatcctgagaccgatagcgctcttcctggctagcctcaatttccttatcgccacccacatatcgaaggaataggtagttcgtcacaggtcctagtatgacaactggattaaatggaccagccatgttgagtagggcaaaggagaaatggaccaaagtgtctccaagataactagacaagcatcagtccatgtcatcgaacgcaaagggtgatatacatatcacgaaaacttacttcggatgccgcaccaaactccaaaccccatgtcgacacaaatccgtccgttctcgtcgatgcagtgcaagctgcgtatctgccatagcctccaacgcaaacccagcagcaaaaagtccaacaccaagtgcccgaacaacattcaccccgtcattgcctatcgggagcgtagctccacccatagtgaacgggaccgtgaacggcaaagagatcacactcaatataacagcctccgggaaaaataccctcataaacccacgtctccaaaagttccgctcttttttggctgcgtcgtaccgcgcatcatctgtcccgcgggacaatgaccggcacgcaatccgagcaaagagtctcacgccccagatagtaacgcagcttagcagaaccctttccgaccatggtagagcctcacaagcttctctgaatgagatcttgtgttttaaaatcgggtgcccgatggcggtccaccaggcattgaggacttgggcggagggccagagccagtctttgagttcgactctgtctgttacttcggctgcaaggtatgttgcgagtgagaggctataatacagactgaatgacggtaggagggttgattttaggattcctacgtcgccgggtgtgatgttgtttctgaaggatggggattggagagcgctaggggcctggttctctaggacagaggggggaatgaaaaatgccatttgggacacgatctggaatactggagggttggctacaaggttaatcaatgtattgtgacttagttgtgctgctcagatgttgatgtcaagattatgtaatggccaaacggagttagacttccgcacggcccagtaaaacacgtggggccccaaattgggttacaaacaatgcaaacactctaactagagttgagcaactataatggacatcgtctcgaagcattcttcggcaaaaaccatgacaagcgctggacagtcacaatttcaataagctatctgaccacgggcggaggccacgggaatttgtaccatgtgcggtctagtagaagtatttcgaactggaattggcttgatatatcgctgcggttgaggtacatgaacggattttatggtttgcctgatcttaagacatccaccagtccttgattctttccagagatgaatctttaagtgtattggatttgcctatgtacatcgatgcccatgaaccacattaccgatttaaccttgagaacctgtacccgcttctgctgctttgactgctctctgataaatagcgacagttccttcagatactataagcatcttttttagttcttcgagctcctctgggtcctcttcgttttgagtccttgttttccaatcgtccacttcggcgcgcgcatcctcaagctttccccgcaagcatgccatttccgcgtgcaccaggttttctccttctagcctatgatctgtatcttcctgcagtatatatacacaaaatgacctcgcttgcgccacctcaaatgcatctccattaaacgcatcaggccacccattttcaaggtacatctcccttaacgaaagaatggacccatcccattccagcccggtgttctccccactacctggaatccattctaaagagcgatacgatcgcaaaatatcccgaagagccgcctcagcatttctgtgcggaatatgctcaaagctattccgattcaacgactgcggttctttcgtcggatgaccttcaagagcgggatcggtcgtgtcccagctctcctgatcaataatccaaatgacatgtcggcgtgcatcatataacatgacgctgccatgattacccaggctggtcaatggtgtgacccagggctggatatacgggccattttcatcctcgaaattcggatccgagggatccccataaaatgggtcgcggcttcgttcggcttgctcgatatccctgaaatcggtaaactcgccgattcgagagaatgagtctttccccgcagcaagcggatcaatatatggtaggatgctgtagagatattttattgatgagtccaggtcgagctcgtcataggcagcctccaggtgggttaggttgtgtggcccgcgcctaattcccgcgcgttgaatatagcgcattctggaaagttcctcgtatatctcaagcataaggtccgccactttctggagacgtgctttttccgagctgagcgttgtcatgatgagggggctagcattgataatggatgttcggtatcgatgcactggaagcgctaccagaacgatgaaagataccacacagatgaaagtgcggaatctcatggcaagaagatatacgatgagatgcaatgccaatgttcaagagctgcgatgggataatgcgcttgtaaagcttgatatattcgcagattacggaatcaaggcggtgagaatataagaactctgatccgctctctgaatattaattaccatagaatagttaacagacagttttgtaggagccaatacttgagaaatactaccgacacggcnnnnncaaaataggtaaccaaagtatatgaagtcatatagccaaaacaggtaaccaaaacatgtgaccaagtcatgtgattatgtcaggtgattatgtcaggtgatttttaggtttgatcatatgatatactataccataataaattacaaaggctggtcgaaaattgcggccagcgggagacttacctgaagtagtatggcgggcaacgtgacggtagcaatttccgcgtgtcggtagcatttctcttctccaatacttaatggtcattaggcatttttttcaacataagcactccttccctaaacaccccagaatgatgacggtctgatattccatctatagaatataaggtaatctttaaagatgtagataatatgagacatattaggagtaagtattcgagtatggcggtcagaaaagaccttggaagaggtattcagtgggtaggtatagctagcctgaattgctttgggctatttgcacatgcggagaaataatggtggcaagatcaatgtgcatattcaaaggctttgattgatccatgtttttgtatttctgcttcatgagaagcatcaactgttcattccagaacggcacgcatgtttcaagatcaggtgtcgagaatgctgtagtttcgttgtcattctcagtatatagattttctgatatattgcacttgaacaagttcgagccggaagataagtcgaccgagagcgttaaaccgagatcatgaaggtcggagccatcaggtatacgttcgaagggaagtcggttggtgggtagtctctttgcctttccgtcctttgtgaaagtttcgtcggtagaatgatcccttgcctgacgaatgaggtatgctcgtggatcacgaggggaaagcgttgtcgcagagaccggctcgctgaccgaagcttgcgacgaagttaacgcagcttttgcggcaagataccgacttttatgaggcgaatgaaattctggagcagactgcgaactcgatgttttctcgttatcgctgacgcgcatccgactgttctgaatagcttccttcttcctcctttcgaagtctagtgctttctccagatctggactgtccgaacaaccatcgttctgcccatcgatatgcataatatctggcaaattgttcgtgggcaatccgaatcgttgctgggtaagaaaagaaagcggtgagtctggttcttgagttggtgcttcctcagtagggcttttctgcagcgagacttgtgttgttctctgaaaccaagtgtctagagcgccgttcccataccggtctcgatcacgttccctctgagcgcgtcgggcgctcgaaatacgattagtttcaggggagcactcggtcgattcttgtggatgctggcggcggcgcttcactggcgacccagatgcaagtcttgaagtaagaggacttatcggggctgagttgggcgaatgctggacaactcgcggttcaccctctctttggattggctcctgcaggctaccgctagatagatccacggggcttgtttgattgaggtaattgtttccgcgacgcggtgtttgaaacgaagcatttattctggacacagaccacggattgacgaagctgggttgcttacttctgacagtgctggaaggaaccgggggcgaaagggcttgcggattctgtgagagaggcgtgcagggtgtagctaaactaaaggggttgtcaggatcaccagggtgtgcggcaagctctgctggcttcctagccagcaaaagttcgaatcctcctgagctctcattcggtttgcaggaattctctttcccttgggtggaatttctcgtctccgttccgtaatggtcgcgaaacatattctctaccaaggccaagactatatcttggtcttcaaacaggatgttgtctttccctggctcgatattgacgtcgtacgtccctcggggacagcgaatttgtaaacagagaaaaggatcgctggactcctttaagacgacacggagatgctgcttgaaatttttgacaatctcgtgggcaacacccctgctgttagacagagggcggccatctacactgatgaattggcctgcattgttgatcttcgccgtatctgatttggttggtaaccacatcaatggatattcaacaagatgagcttacccaattgtatatttttcggaagaaaagccgcagcttcatatcctgtctgatctgatttttctttcaagacacaggaagaaaaaacttccgtgccagctatctttagaactgcgtccgagagcgacgcgtctgcgctcggcacgtagacccaattgctattttcaccttttgtcttgaggactttgaatgagaacctcttcaacggttgagctatagcgtaggcctggagaagtttcttgatcttcgtaagactttttgcagcacccttcaagatagtctgcctgcggacaggtatatgcttgagaaattctgcgatacgaacagttgtgcccacaggatgtgatgtccgttgtgttctgcgatgcaagtttagtagtggcacagaggccaaaaaatctggcgaggtcgacatacccagtaagctctccgtttcttccatacttcaaacatcgtccggcaacttcggactcaactcgagtggtgacagtgacaagcccagacatctctgcgacactggcaagtgcttcaccacgaaatcccaatgatgaacccccgacgtttttgagatcatctaaactttggatcttgctggtaaaggctcgtttgcagacattttgctggtcctctggagagattccgtggccattgtccttgagttgtatgacatccacggtattttgggaaatttcaacctgtaatgacgtggcagaagcatccaaggcattgtctacaagttccttgacaacagagcagggatccgatatggcagatgtggagccaatcgcccggattgtcttctggggaagagcctcaattgtcatcctgcacgcttggtattagttgttggtattagttgttcatctccaaaagcacaaattgtctcatccaggtgaccgaaggccagaaatacatgcgaacgatttcaatggcttatagttgatgaacgtggactcggcgaaggaggatgggaggatgatattgtcttggcatcctgggtcacgttatgctaatgccttattattcaggccaacatactctccttgtctaggactgtgccaatagtgttttactgcacttctgcgttactgtctcttccctatcgcgcaaagcatattccattcctgaagctcatggatttgattattgctaaataatcaagaatgatcttaaaattaggccttttcctgccttttcctgccgtctacgagacctctcaaaagactgctgggtcatgtggttctcaatgacgaaggcctgctcaatgaaactgttttgttgtccaccggtcgctatatcttacctcactctttcaagcttcgaacatggaggttttagggttccgagtttgtacccgcctagtccttttcatcgtaccttttgattctcttcatcctgggcttcaaacggagaacgataataactcgatcactttatatcaatgccggccagcatgatactcgaactccaacaattcccgggtggatttcatcgcccatagtgcctactctagagcgggtgttctgcgacaatcatcgacgaggcacaataggcaaattcatcaaagttttactcgtctcgcctttcagacttctgtgatcagtccactgttacaattactcgacagaggcatatgcaagagacaggagacggactaccatactcgaagaagaaaatcattcctggtgtgtgagtgacggtctcatatcttgaggcgaagtgctgtggataacatcctctatgttagagatgacttcgccgaagcaaaggatggaaatcatatcttataacatggtccaacacgagctttattccttcttgagatcctttcactttccgttcatacgagcatcatccacaatgcgtgcatgacgctagagtcgaaaattgcagctacagcaagtaataccttcacgagtgacacaagtcgttcagcaacaacacagcggattattaaacttgaattaagacgtggcgtcagtgattcaacggcccaaatgagtggtaagctatgtcatagggttcttacccttatgactttgaatatgacagccaagttgaagcaattttatctaaaacatgcaaccttagatgcatacaacaaccttcgaaggaatggtggatgactaaagttctgcctggcaataacatccaataggaaggcacatacagcctcattagtcatcatagtcacagcctcaataaacaacgtccaactttatgcctctgcagcttcttagccttgctcactcaaacggctgaagacgccgaaatgttgggcgaggacttttcaatcactaagctcgcaattcccgccgtcagtgttctaatcgccttcctcgcctacacatcacagtacttgtttctgcatttcgagtctgcgcctctcaagagggacgaaatttggaagatcaatatcttcgctctgtgcatctggatatgctattatcgaacctgctttgtagatcccggtcgacttcctaaggctgaagagcgaccgaaacccaaagagcaagaaggtgaagcactcgctagtcgccagcgatggtgtcgcagatgtgaagcttacaaaccgccccgcgctcaccactgcaagacctgtaaaaggttagataaggaatgcttgatgtggaggattttgctgatcttcttctagatgcattcctaaaatggatcatcattgcccctggacctcgaactgcgtctcacattttaccatcccgcatttcatgcgctttctattctatgcgactgttggcatgtcctatctggaaactcttctctggcagcgtgcatcatttgtatggaagaacagtcatctgccaagcgtaagtaactctggtacttcttttcatcattcatgcggctaatgttgaatagtatctcggccccacgttggggcagctcatccacttgttcatactgctggtagtaaatagtttcacgactttcgccctctttgttctcctgcttaggagtttatgggcaattggatctaacactaccaccattgaaacttgggaaatcgagaggcatgctactcttgtccgtcgagcccgtgtgctgggcgggtatcttgagggccctggaggaattcgagttcacataaaaaagcaggaatatccatacgacattgggatctgggccaatatcaagcaaagtatgggcgggagcgcgaatgtgagtatgcctgttcatggtccaaatattgacacgcaaacacgtaagctaatgtctttttaggtcataagctggttctggccactggccgcatcacctgatcgccggtccggctgggaattcgagaccaatgactttgagggtgagtggttgagtcagtattgtgggttttcaattactgatcttttttagatcctggtgtatcatggccacctccagacccagatcgaatcccggtgccggttagtacaaggtcggataacattagtatgcctgcatacgcaagtattcaggacgagattgatgccttcaatcgtcgtaaacaggaagacatgaagcgattccaaagtccgggtgtacagcgtcgcaagccatttcacgaccggtacaaaaaaggtgcctacgctgaaagtgatagcgatgagtccggaactgactccgggggttattcagaagagggcgaagagtcttggcgaaacgccgaaggagaacgactacgcgactttggggtggacgaggaagcagaattctatgatgaggaagacatccctcttggtgttctcattgagcgacggaagcggcagcaatctgctaattgaaccatttccgacaaaaatcatctgtatcattagatctttttcgcaatacccctgagtcgcacatatcccagccattggctcccatcttcaccacgagttatcacgtcctggagcacatcgcaaacctggcgcactgcagcatcctgcttttcctcggggagcacgtccaagaactgggctcccatcagtctaacccatccctccagaccgcccttggcgtcagtggtgagttttgttgggcggtactctagctcgacgttctcgaccttgaaaccgatctcttcaagagcatttctcatccaggtatcagatgggaagaaccaagggcttgtctcatttgcttgtttgacagggataccctgctgcaccagtgcgcagacaagggccgtcttaacctcggccacattgccatgtccgcccatttcgaatacatatgtgccgccaggcttcagacagccatagattgcgcggagagttgacatgcgcgtcgactcatcacgtaagatccagtggagggctgcgttggagatcctgtctggttgttagaggtcgagttccatgcatggtggaccatgtattataattaaagacatacactttatcccatgatccattgacaatggaggcttctttctccaggtaccggcaatccacaacgcggaagctggccttggggcttgcgtagtctttgttggcagactcgatcatagacgcagatgagtcaatgcccaagacggattctatggcggggaggaagtttgcagtgaattttccatcgccgcaaccgacatcaagcaccttgtctgttggcttggggtctagagaggtgaggagttttccggtgattttcgcggagtgcacgaaggatgcagaggcagagtatgcctaggcttgttaattatgattcacacgtatcgccgggaggaatacatacttcggccgaccagtggtctttaggaccctccgtattggacgccatggtatatgacaggtgcaaatatggagaagtggggaagtcgtagtcttggcgtggaatatcagtcaggaacaatggaaatgatagtcaatcaagacgtgagaatatttcaagagttgttcctagtaaattctttcctggttatcgaaaggtttgatgggctctcttatatgttttctctgtagagtgggcagttattcaaggtaggataacgaggccgatatcggaccggagatatacttggccgccagtacgggcgactacataagtgtaccatcagaacataactctctcattggataatattgccaggcatttagatccacccccaactgtataatcagagctcttccacctggacactgtaatgtgatcatgtacgagcacgtgccctgtcatgtgaccatcacggcccgtgcggtcccgtgcggaccatcctgccggtactccagttcttctgtggcgcggacatttagtaggcgaggcgtatagttgctgttcctagaggagtgataacacttgcttgaggtgttttcggtatttctcgactgaatctgaaaagatcaggatatcaacaacacgttacgtccccttctcgggcgaaacgtaggggtctaagagatgagaagactatgggatgactactgagaatggaaaggtggaaaggtgtttgcgttgctatctatgcctcgggagtgcttttctaactatccatcacatgaccgcctagtcatcctgctctggaaacccccactaactaactagtgtgtaggatggtccgcaacgggaccgcatgggcccgtaatggtgacatgacaggggggatcacagtaactcaaatggcttccaccactactaccaataatgatattccaattgaaaattgggtttttatgctagatagagagtattaaattagataaattcatccggtaattaatcataattatggtgtaattctacgaagaacgaataccagagccctttgataattgtacatacaacgatataaatcctggaacttgggcgaaagcactccgataaggtggtgatctatagcggtgagctactatctaataacagagttactccgtatgtatacttgatcgtccgtacgcctgcatgggatgcacagacctactacgtatggaaggtctagaccttttttcttttcgaataacttcttattagagactgacagttatattcaaactacgcagcttatacgggctgtacgatttatactagccaaaccaattgatatagtgtccgggcacatcacatgtaaggatctatacctacttacatgtcaggattacaagacatcactgcttgcccttacaactaactacgacccatacccctttctctcctgaaatgctcaaacaacaaaagtccagtccagacttaaaactgcaatcatattgggcacctagtgggtacacggaaatggcaatggcgaaacaattcccttgagctccactaattcactgggcgaaatcccccctgacttctgcaaagtagtatatatatcaggatgtctgatctaacaagctgcatattgaaatatacaaaaccccacctcttccaatcaatcagacaccatgtcttaccacggccattgcaattgcgagagcattcgcgtcactcttcccgagcaacccgagacctcagctatttgtcactggtatgaaatcattcttgaacttacaatcatttgtcttgatggtcatgtactaaaatgattctgcaatgtagcaataactgcaagcaagcaggtggtggtcgtaagtacattcgtcaaggcagctgtggagtgtacattgcttacaactatcttagccttctctgtcaactacattgtcaatgaagatgacttgaccgttgaggatcccaatggggctttgaagatctacgaggacaagaattccgatagtggcaatgttgtgaaggtaaatcgttgtccatctcgaagtactattgtttgttcgaacaaaaaactaacctcgaaatagcgtcatttttgttccagctgcggcaggtatggaatacaaattcaagtccagtgataactatagctaacacctattgcagcccagtgttcaccaaaacccccaaggcccctggagtagtcttcctcaagggccccttgtttgacattgtctccactcctgcacttgaggtgtttaccaataagcagtacgactgggtgaatctcaagcagggagaaatcgaggcctgatatcaacacgaaggtaggatcgacatggtggtttgagaaaatgtacaaaaaaatgaatataaacattgtcctatgcgatggcgcaattctcagaaagcctgttattggtccatttttaagcataaaattcctgtcgcatttatattcgtttccacctatagtatagcttctacagagtacggagtaccttggtgatatagtgtttgagcagacgtatgtagatgacttaaagcataacggtttaaatgtggggacgggataatttatttcaacctcccatctctcaagacaacggcaaaagcgcaccacgccgtagccatgctgctctctccgggctaagactacgtataataatatgacaaaagtccctgctcaaacgtccggtcctaggcgaccgtccggtgccattttgcggaacacccgaccgcgcgtcaacgacaacatcccggatccccgcgaagcgctcgagctccagcggatccagacacgtgaggacaacgagctggactactcaacgccgtctgcttcttccggcgatgaatatcacgttgtgacgcgtcgcactacggcacgcgctctcgcgtcacgtgccgatgccgagcgtcgccggcaagctcgaaagggggcttggggcaagctcacccggttttggacgcataatattactctaacagtggcgcataagagcagtcgggattatttcggtgcgtattttgcgactgcgaccccgacttgccgatctgcataattctaactctgcatccaagccttggagagaacattcctcgcttatctgcggacctcccttaccgttgcccaacaaggcgtgctaattgcacagctgttccgtctgcaggcggcggaggagttggcggaccgtcttgggtttggtcaggtcggtacacccctgtcggtcgcgtgtcactgtgtggctattatcgtggctttggttggggcgtatcgattctggaggcagcagaatgctattgctaggggtagggtctatgctggaggctgggacatgaattctgtgggggtattactgggttgtgtgagtggtgcaaatgcttttcggttgaagatgtaactgacattggctagatcactataacggtgttggttgtttccgttgctattatagtcgaggtcgacgttcacccgtctatattttttcgacgaatattagccagctgagtgatcacggagatatgtaagtttttatgaatcttgtcttggcaatcatcagcctcatatctagactatgtaaatataattctattgatttaaggctatgtagcggagaggcactttgaaatacttacatgattcattagttcataaatgtggagttgattaattagtatgtaagattatgcatatatgtactccgtatggatgcaatccttcgcttcatcatatacatgagaggtcgttgatgagaagtgtcgttgttcggaagacgtcgttagtaagaggcatgaagctcctcttcaagaatatgccattttctagcaacctctgcccggtcgtcagcggtcgatgtccgcatgtcttcaatgccttgcgctatccgagatgccataatagaaagctccacgttcttgcctagcgacttttgaagttgtctgcgaattccaaccaagggatatccaaagagtccccagagacctagaatgttgagtcagaatgagattcccgcggcgaaatagccgttgggtgatgcatagcgttaacatacctgctggtggcttgaagataacacccccaatccctttcccgattcccttgatcattcctttcgctccttgttgcttggcgccaatctgaggctgggtgaccagacccgtgataccgtaataaaatccatctcgaagttcctagaaggtcaagggtcagacatgatatttttttttcccatcgaggatgagtgacataccgttccagctgccgcgagtccactacggaagcccataaccttgggcatatctttcaccattcggtcgtggtacaacatcggcgcattgtgaaatcctttggacaagctgagagtcaagtctgtcgggagccagagtatgctttttagtaactttttcgacattcgactaccgtgagtacgtatttcgtagataacaccctgcccatggggtgtctctatataactcaatagtttcttctggtcaatcggtatgccttgtttttggcccacggcactagctggtaactcatggttcattctgttgtgtcttatgtggtccttctcgctgtcgttcgtgtcgaggttcatcaaatcattaccatttgatccaagtccatcatggcactcggcaggcccatgatactcggcaggttcatgatactcatcgtcatcactatccaggcttgaatcatgacttttgcgggatttgccaaatgaaaaccttgaggaaccactgcgatcacgagtatgacctattgcacgaccggcctcgacaaaatccacaacgatgtcataagggacctcaccgatcccagtcacgaagttcgcaatcgctccaactagcacctgagctcctgcgctaattgggccgacaggattacggtatgtgtcatattcctctgctcggttcctggacagttgattagtggtgtgaaatattttggcaaaggccaacctacaaagcgacatcctcgggtttgatagcccccatttcaaccagtactgctgcagcaaaggcactcagcccaatggaagtttgcttaatgtgccacacagcaggacgagtaggacatattgcgcattgtaaagtcttcaagttaagatgacgatgaaagctgcgtactccatcccgcacaccggactctgtccgcatcttatccgcaatttcttgagccttcgcttgagttgaaggtagcaatgctgtcttaattgcatcggtcaacttctcaactgtgagttgcttgtacgggacaggcatcggcccggccccagccatcgccacgattcctccccagaattgttgatctccaaagaagggaacgatgatcgtcggacgtccaagcgcaagccctgcggcagtggtacctgcaccgccatgatggatgacgcatgatacgtgctggaataaccagtcatgtggtatgctgccgacaatgaggatattatctggcacgtcggcatcgtcgattccgaggtttccccagccttttgaaatgattgcacgttgccctgaaaggtttatcgcttcgaacacgattcgagttagcttgacttggtcttgaaccacaattgagccgaatccaacgtagagtggagtgggccctgctttgaggaaatcttcgatctcttttgggggttggtagtttgactttctaggtagcacacaaaatccgcaaatatctatttgatcaccccagtcggctggctttggcaacaatgccggcgacctaaagcaaactataattagtgaatggtccaaatctgccaatttcgggtcaacccataccacagatatgagaacggaacgccgagacgctggggcaaactcggcgccgtgatcgaatctaacggatcgagtgcgaggcacttcttccgccacgagttcacaagatctcccaatccttcccaaatcagcatatccacaacggaataagacacgaggtttgcgactgttggcttgcaatcctgcgggtggagaacggctaaaggatgtggaaacgactgtgtaggcgaccagggcattctataagaattttattaggtatccctcaatttcacgcctggaagtagactcacgtaaacatcagatgaagtggaattcccagccgctgtgcgcaatgaacatggcccaaactgggcggattggcgattattgcatcggcaacaaacggcctccgacgataatccacagtgtcactccagagatcctctttgatttgatgcatatctgtgccgtcgcctgtttcaatacatgacctccaacagccgtatataatgtccttcatttcgcgccggcgtttttgtatggcaccactgcgaatcgtgctgaatgcggggagtaaggatgggttctcgaccatgaatgccatcagttgttcggggtctccaccgatgctgaagaactccaagccgccctcaagtacaaaatcccggaaatagaggtgtgttgccagacgtacgcggtgtccacatgccttcaactccttccccagcgcaatgaacggctggatatcaccccgagatccgataacttgtatgacgatgttcagcttcagtgggaagtctttgcccttatccttcggtattggttcaggggtcggtttgccctctagatctggtggccgagttgtcgtttggatgcgatgtaatagccctgctagttgtggcatatgctcgttgattttgatatcaacccttccatcgtctaccagcattaccgttagcgacggtttgtattgcttcacttgatcacgaactcaagactttgaccccggcatttcgcccctctccactgacatgcttccgttcgcggtgtggggagatcggaacgctgacctccccaggccagtcctccgatcggattgacccatggcgactggatctgggcctcaaagttgttgatgccgagtccattcttcgcgggagatcgacgatgtggccaactagagtgacacagttcaaaattggcaggggggatcagtgtatgttacactaaattataaatagtaatgagtatgttcatattagaattgtttagaattggtcacattgtgcgggatcaaagacattaaaaaagaatatgatcagctctactctgatgatgtcagaagggtccgcagtctattaccgccggtgcgtcagttcggattatgccagcagtatagtttgtaatacgagttttatacatcttaatgttatgcataacttatcttgctgctaatacccaatgctataacatttttttttcaatccgtacgacttgatccgttaacttatagtcatgatatagaaatagagcaattttctcttggaagtcatgaaaggccggtgagcccggtcaaaatcttgaaaatgtcaagtgacggtaatcagagtgccgcagtcccgagtctcaggccttcccggataattccactgcggatcccgagctcgggatcaatttggacctcgggatccctatggattagtcatctttatatgcagcccttgttggacattctcttgtgcaggttatcgaccgaggtcgaagatcattgctatccatgttttctatttcgtgccaaagattgtctgagacattataggttgcacacttcaagctgtgtctgtagtaatgcgctcggtaggatgagctggatccttgagctacttgtaatagaggtcgacgctctggatcgagcatattatctgcaaacttgcgtttaaacttcgaaatctcgcaattttcgagcggaattaacgggaagatcttgtattggcttatcatcggaaattttctccgatatcaagccgaatatcttccacatcctcgtcgatccagtcgatccattctgttgccttgaccggctggtcagcatcctttgtctaaggcgtaccatcgaagcggatgagcggttcgatgcttatgaacatcgaaaagctcttctcgggtggattcaaccgttcattgcaagtacgatgttcagccgctgagattcttaggtgtctccaagggtgacaggttggtctcccctcaggacatatattgacagctcctgggcatagagaaggttgctttggtaaaacatgttgaatttaagaactggggatgggagcgcttaactttcctatgtaggggcagtccagactccaggccaagatccgatgactcatctggatccacccccggctccggggccccaggaccgccacccgtgggtgggttcctttctccaacattggaggacctgaatgatattggctatagcacaccatcctgaggtagctttagataatgaacagagcactctattggccattcttaggtgtattttatctctaaactccgaaccttgactgcgatataggaagattaagatctgaggcatagcggtagcacctgaaccttttggactcatattaggccataggctcaaataatgggagcctgctaggagaagcaacccgtggccctttagccattgctttgaatggtttatgaatcaatcaaatcatatcatatattctatacagtctgaaatagaactacatgatcccatggatcttctagggctgcatgtagttatgggcatgtcctagttgacattagaagcttacgatctcaaagcactgatgatgtagtttagtatgctgatgtgcagtctgtatcatggttatggcttgcgatgtatgcttaatacctgcggtttttcagctcgcgccattctaacgagacgtattagttttcggctggtatcataaaccgacgcaatagccgtgctgaccttggcaaaaagaagttcgggctcatgagccgactccttcgcaagccacacagtcgaaaatcccatataacttgccttgtgatggacttcgtagcttataggtggatctgccgggtttgcgtcttgatgactcctgtgtatagaaaagattattttggcgcagcacacctatatctatgttcaaatgttgatcaactgagggcagggaggcacttagtgtggagtgaggacgtcatgggctgagaagtcatacgccataaatcagccaagttgcccagccctgcgggaggtgccgaggtttgctggtttatcggacaagcgggactggcccggggtaggacccgaaataccccgtgatcaccgcatggtgtaccggatatggccagcatttgattggttaagtacacaaattcaccgcctcactttccttcgctccttcaatgcccctattttatgttctgatctgatatatggcttacggtatgagaggcgttagggacatcatatgggggccctttggaactctgtttagaattcgttttgggggctttttgaggggttttccccatcttggtgttatagctagaaggatagagaagtttatacatgatatacatattcagaaccagctatgcagaaattgaaacatacatggctggaatggcggttcaaaatgaagagttcctgctaaacgactttgcaatataacatgcgatatcaggatcttaatctatcgtaaatctggagatgttcatcctctaccaaattcaaacccaaccaaccgaccgttcaaccaattagacaacggttgttcaggtgcgctgctatctcacgctgtacaccgtctgactgaaggattggaaactcattggcacccgcagatcacttccgaactagacagtcatgatattcgtggggtgccttcctcgccaatgatactgaaagcggcgttttttaccggctatgggaaaatggtgtccgagccggaaaatggtgtccgacttggtgacatcccggggccccgcgaaaagcctcgagattcatggccaagcgggtcttccccgcattctctcccggccgatggcgtcaagtcccaactctaagtgtcgaatgcattgtacgttcactctaaagggggcaaaagagttggggtaattgtagtggctgtggttggtgtaccgttgaatgaaacaaggttcacattccgcagttttgcttatatttgaaagatatcctccattgtttctttctcaattggatactaagagcctttcttaggacaactacctcattcttacccactttaaatatcactgcttcttagctaccgggcttcaaggaagaccatggcggacaagaaagactccccagagagcgaacattttgaatccgaaataaaatcggaccctactactctcatatcaccccttggatcagaaagaaaaccatatggcgaaactggtattgcttcccctactgtctctatactcatcacatactaatctaccgtcgcaaaacaggcctgaagggcatcctcacaaacaagtatgtggcagcatgcgccgccttcgcaaccctgggcggagccatgttcggctacgaccaaggtgtcatctcaatcactcttacaatggaccaatttctcgaaagattccccgaagttggtcccgatgcacccggcgctggattccagaaaggaatcctcactgccatgatcgagctcggagcctttatcggagcaatgaatcagggatggattgccgacaagatctctcgcaagtggtctatcatggttgcagtgataatcttcctctttggatccgccctgcagacaggagctatgagtttctcaatgcttgtaggtgcccggtttgttggaggtatcggtgtcggcatgctggccatggtggcaccactttacatttctgagatcgcgcccccggagattcgtggtactttgcttgttctacaggagctttctattgttactgctattgtggttgctttctacatcacctatggtacacgatatattccgagtgaatggtcgtggcgccttcctttcctcattcaggtatgtcttctttgttaaccatgattttccctaccctaaccaccgatagatgattcctgccgtattcctcgccgtcggtattccattcctaccatattcacctcgttggctcgctggccgaggccgagatgaagaagcactcgagtctctctgcaagttgcgcggtgtcgaccctactgacgagcgcgtcatccgagagtgggttgagattcgcgccgaagttgcttactgcaaagaattgagcgttgtgagacacccaaagtgccaggatggaagttacagcagccgtgctatgcttcatgtctggagctatctggactgtttccgcaaagggtgttggaagcgtacccatgttggtattggactgatgtttttccaacgtgcgtatctgtctgtcgtggtctaaccaccactttctctccttttcctcctcacagaggctaacccatatccttctcgcagaattcggtggtgtcaacgctctcatctactactcgcctagtctattcgccggaatgggtctagactacgaaatgcaactccacatgtccggcgtcatcaacatctgccaaatgctagcctgtttctggtcactatggggaatggacagatttggccggaggcctttgctctttggcggtgctgcctgcatggttcttgcgcatttcataatcgctgtcttgatgagccaattccaatcggactggcctgatcattccgcagagggctgggtttgcgtcgctttcttgtgcttcttcatgcttacctatggcgctacctggggtcctatcccttgggctatgccggctgagatcttcccctcttcgctacgtgctaagggtatggcatactccacaatgtcgaactggcttaacaacttcatcattgggcttatcactccgccgcttgtgcaaaacactgggtatggaacttatgcgttcttctgtgtgttttgcaccctgtcgtttgtttggacgtggttcttcgttccggagaccaacgggaaaactttggaggaaatggactcagtctttggggataacacttcgactgaggagatagcacagcgtgcgaggattgaggctacaatctgggcccatgctgccgcacggtctgatgggctcgaaggtacccagcaaattacttagatggctgactttgcttccatgtttctcgaagcagtgggtgtctgatttatttctgatttatttgtgttgcttatataggtatctatgagggcttgctctcatgttataatcttctttgtccactgtagattatgaagctccttttttcttccgattttctagagtatcctcgctaaatttcccaaagaaccggagacaggccaacgaccgaaatgcacgatgatctcttctatctgatataatggctgtctatgtaggtaggcttctcaatcatccaagccatacactgtcaggtcctggctcatcttaggaagcgcccaaacagcacactccttccctccgaaaaccttcaacttcctctgtccccgaaactcaagcccgatcttctccaacaccctcgcactgtgcgtatcatctttaccacagaatccaaaaaccgagtcaaccccgagttccctcttcgcatacgccagcaacgcaagcgcggcctcggtggcgtacccctttccagtctcctcgggcagaaacgcatatccaatgtcaggcaccagataagcattcggtggctcgcctctcatcaatgatacggtgccgataggggtactctcggccaaagacgcgtgcgcatgcggcttcagcgagaccaggaacatgccatagttgtttcgggcgtagtcggcgtgcacgcggtgccgaaggaaattggaggctttctctgccgtggtgatgctggtgcgaccgcatgttttcataaactcctctgtattccatagcttcatgaggaaaagacagtgctcggtagagtcggggaagaagtaggagatttggaggcgttcgctctcaattgagaacgtgggagatgcctcgaatagagagcccatatttgcttgtttcacgttcaagtgacgtagtagctgagttgtcacggaggtggtaattgattggtaagagtgagagttgtgacaattgagaaatttagcagtagcagggatgtggtattggttacagcagtaactggtgggtgcttgaaacagaaatttattcccatgtgatcgatgcggctgagagatagggcgttagcttaaaccagctgacctatcctgggatatccttgccttagatctatgtagtatcaattgtccaatcagactttgtaatacaaattagaaattctcgttatccgtcgggagtccgactggtaatactagtaaatactattttacgaatacaaaaacaacacaatgatttccgagcccttgcagaaggaggggtacgtcctatcctgaggtcatattccttatcgcaacacgttcatctcacattccaagatgctcaggtgttatcggagtggactcgatctgatcgggttcggttcgtgccgctatccgatatccccgcattctggtaatctaggtaatattaccatgaaatacggaataaaatacatcaacagtatcctgaggtctacgtatagtacgtgaggtattgatactgaaagaggctgaagatagaggtaaatgtgggtattggtaaaataagcctcgtattatttcaccgagtgtagatatcggtagaatactactgcagatcagactcctgtcttttagcagcctgccatttccgcaacgcgtcaaagtcaacgcattcatggattactccccatcccagcccgccagctgtcagctctggtgctgtccccggtggactagcaggttccagaactaggaaatcaccgcatgtgattgagaggcggagatattcaaagcagtggtcagtatgctctgtccaggccgctgaaattgcgtccgattcgttgacaggttgattggtttgagactcatagtggcgaaagcgccgtcgaacaacattctaacggacagtaaaggttagatttattgccattcctttcgtagaaactattgtgacttacgacacagtgaagttggtgaagatttgacaggacgtagaaccgctcatccgtattatccatgttcaaaggatcagaaataccctgggctaggccataatccgatggattttgcagccagacggaatcacctcctggggatcaaagttagttttattttgccatttatctggcgagatagccagcttaccgcttgtgatttctttccaggctttatcgacagcttcaccactgccatagtatttgttgtcggggacaaatgggatttttaatcgctgctcaaaaacctcgttgggtataggtgtctttagacgtagtcctggaacaaactcaggcgtcttgaagaatgaaacgctggtaaaacctaggacaattcctagcccaaagacgacggggagaagaataagatatgccctgtaaattcttctggatacatgagatcgaagtctggtgtcccctaacagagcctcactagaggtagctctgtcgtcatcgacatgttggtgtttctcgtcatgtacactcgtaagtgtataagctcgcgacatagtcgatgacagtatactttgcagcttcatttagctgtgattgaagatgtttatagtaaaattatagaacactttcagcgaaaaggaaaaaatttagaaaaattaagccgcaatgatcgaatgcgtcggcagagtgggaaatggatgttttctaggtgtccatcttcgaaatggtcagagattcctatctcaagacctgcatgtaatagcgcacaagggttctattgatctacactaacagggattactaggtgttacgcccaccccactgagcggaaagatcggtgagtattaccggcattcatcgtaatttgggtactacttatttcaaatatataactcgtgcgattagtctgatatgaggaatgtttcccaactcccataaaaatgtgagataggtagctagtgatccctagcttagtgcatgttaaggcacatttcaatcaatgaggaaattgtggactgaggagaggcagagtcgggacagctcatgtaacatcacgagaagagttgaagtagttggcctgaaaagggatcgcccctcacctcacatctatgtgcgcgctgcatcaacacgatgtttgattctcccgaaaggaggcgagaacacccgatggcaacacgggagtagttcagctcataggcttaatgcaaggtaacttgttgcctacatggccacataggatgtggttcgcgtgtactggggttgccccaggtcgattttataaatacttggcttcttgaccacctagaatgcatttcttcatcgacgtcaatatcgaacttcaaagtatcttcttcaaatacatctgaactctaagtctaagcctacgaattgtgagatcaatgctaccaagttaattttaaacccagtatacagagactaattatacatagtcttcaatatgaggtttatcatcgctcagacagttttggccgttaccttggctgcagtagccagtggtctggccatcaattccgaggccgcggagccggcttgggtttggtcttcggcttccaaacgcgggcctgaagaaaatgtaaagcccgaaattgcggagccggcctgggtttggtctcctaagcgtgatgccgaggagaatgcaaagcccgagccggcctgggtttggtcttctaagcgtgatgccgaggagaatgcaaagcccgagccagcctgggtctggtcttctaagcgtgatgccgaggagaatgcaaagcccgagccggcctgggtctggtcttcatccgccaagcgcgagactgaagagcaagtaaagcccgagccggcttgggtttggtcttcggcttccaagcgtgtagttgaagagcatgaggagattgcagcataagggcttcggccagctgaaacgatggaatgcttcaacagccagccacgagagacgaatccaacgaaaggatgaatttttgatgacaactaaagtgggatggtgctatgtacctagcttgctctatctttatttctgaattgactcccataaaacatttcggatgctgaacaaacctccaaacgtattagattaataatttctggaactacactcatttatagaccaacatgggacacagacaatgacagatgttcccacattacttagatgatctataccaattttagtagcaagtgactgtaatgtctcctaatagcaatatattagtaaaaagcagtaatttattaaaataagtcagcattttatctatctattttaggtaatccttagtataattatactagtgtagtactaaaactagtgctgcggtagtgctgcagcactatacaacagcaccaaaattggcttagtcccgcagtatctcgcagcaccatatcgcagcaccaaaattgccttggtgctgcgggacttgtcaagctctattcattttaaccaagaaaacccttgctgtaaacttgaatatgtcaattgaagcagagtaatagcaggtagaccgtgtctattggtgcagcgaccgcccaggtgtagaatttacgggacttatctggtagatatcagttgatttccagacagcataatagccttggataattcttgttaattgtatgatagagagagtaagatctatcgattagaagtatctctaaaaatagaggctattttatcctatgttcgagagactaatatgtgcaatgagaaaatcaataacnnnnnnnnnnnnnnnnnnnnnnnnnnnnnnnnnnnnnnnnnnnnnnnnnnnnnnnnnnnnnnnnnnnnnnnnnnnnnnnnnnnnnnnnnnnnnnnnnnnnnnnnnnnnnnnnnnnnnnnnnnnnnnnnnnnnnnnnnnnnnnnnnnnnnnnnnnnnnnnnnnnnnnnnnnnnnnnnnnnnnnnnnnnnnnnnnnnnnnnnnnnnnnnnnnnnnnnnnnnnnnnnnnnnnnnnnnnnnnnnnnnnnnnnnnnnnnnnnnnnnnnnnnnnnnnnnnntttggtcttctaagcgtgatgccgaggagaatgcaaagcccgagccagcctgggtctggtcttctaagcgtgatgccgaggagaatgcaaagcccgagccggcctgggtctggtcttcatccgccaagcgcgagactgaagagcaagtaaagcccgagccggcttgggtttggtcttcggcttccaagcgtgtagttgaagagcatgaggagattgcagcataagggcttcggccagctgaaacgatggaatgcttcaacagccagccacgagagacgaatccaacgaaaggatgaatttttgatgacaactaaagtgggatggtgctatgtacctagcttgctctatctttatttctgaattgactcccataaaacatttcggatgctgaacaaacctccaaacgtattagattaataatttctggaactacactcatttatagaccaacatgggacacagacaatgacagatgttcccacattacttagatgatctataccaattttagtagcaagtgactgtaatgtctcctaatagcaatatattagtaaaaagcagtaatttattaaaataagtcagcattttatctatctattttaggtaatccttagtataattatactagtgtagtactaaaactagtgctgcggtagtgctgcagcactatacaacagcaccaaaattggcttagtcccgcagtatctcgcagcaccatatcgcagcaccaaaattgccttggtgctgcgggacttgtcaagctctattcattttaaccaagaaaacccttgctgtaaacttgaatatgtcaattgaagcagagtaatagcaggtagaccgtgtctattggtgcagcgaccgcccaggtgtagaatttacgggacttatctggtagatatcagttgatttccagacagcataatagccttggataattcttgttaattgtatgatagagagagtaagatctatcgattagaagtatctctaaaaatagaggctattttatcctatgttcgagagactaatatgtgcaatgagaaaatcaatgaccttgtcatttctgaaaaaaaaagtccatggcgcctaaagcctgtatgagggactggtgtgcatttttctctctcttcaacttgcgacccaagcttagacggctttccaccacaatatctcagaacccagtcccactaattgaccaccagatatcaggggtattgtttagaattgctgtaacaaccggggcatcgagttgcgtgaagttgattttgaggggcggagagaagcatcctcggtgaggggaaaaaagggagggggggtttgaagatatttgaagggactggggagagacctaagggacttgaaagccattttcctcagaaggttgatatcggaggagtttggactctctagtactctcctgtcattccaatatagccgttcgtataaccctaaaacggagactattaccatacggcatgggcttctccatttagcccttctcggataatctgaacccatgtttactgtcgttctcttgaaacagtccacttctggttgcgctgtggggctctagtgctggccctggtagtaaacgcgggttcagactgtctaagaagggctaaatagaaaagcccttgctgggcggtaatagtctccgtttgggggttataaggacggtcatattggatgacaggagagaattggagagtccaaactcctccgatgtcaacctttctgaggaaaatggttttgtcgtaggtcgagagaaaggcgtgcttggtgttcagttccttcatataacgagaaacttggcctgtaagatagcataactattagtacacgaattcaccgcggataactagagtgtataccatacctagcctgcgacgaaatagttttccgtgtgcaatctcaaaatcctgcactcccatactcagcatatcacagtgtgcgccgggccatggggttttcactttcccaatgaccttgatggcagagacatcgttgagcatcaccatatctgggacccttgtgtaacccgctgctgcggccgcactggccttgaagtctgccgcccgtaggtggtgatgctgggcttgcagcgaagcggtgaccggccgtccaagccgctcgttcaaacggccttggaggccggtctcgtctccgaggacgagctgttcgacggacattgagttttctgctctcgggccaacaatgcgaacatcaagggtatcggtgctccaattggtgcttggcgaggagagggcggcaatgacttccctttcgaagtttggccatggcatcaactggcccacaaaatcgaccttgtggatggcgctgctgttggtatggttgggccctaccaggaggggcgggagagtctcgaggagaagttctcgggcagctagagtaatgatctgagccattgctttctcaattcgagtgcgttggtcaatagacgtgatgatttgatgagatgaatatgttactttcagtcgtaagtgctttgttcagatgataggatctcacaagctgcgaagtaatcagataagaaggccgagaaaccgatagagaggcaagtaaagaagtctgagagccagattggtgaataagaagtgaagcctaatgagctaatagagagacaagtagagaagctgagattgactgatcgagtagagagaagggaaaggctaagagactgatggagtagacaggtggagaagactaagactagagtaattgttgggattgtttgcacggggtgtattgtagagtaggtagctacatagtgtgctccttgagcttcctctactcccctgtcccagtactcgacagcaaacaagtcgtattgcccactcaccttgcacccctccctcgtagttctggcagtaatgagctaagatgatcaaaaggaacaatgtccaattacatgaagcaatgatcaaatcagactttccagtccgagatatcaccattgaaacttttgttccataggtaagatcgagggggcctagcaagatcaaaacgtggcaaccactctatgccgaaagtgcctttagccttgaaaccctctgcatcccggaaaccaacaaaataactgtagcaatacgttagtcgaactctcaatattataaacatgatgagcggcatacagagcaccggtatccgaattccagactagattccgagggcgggccccttcagggaaataccccatatgctgggccttcctaataatagtgattccatattagcattacccttggcaatagaaaggtgttcgactcacggaagctctcgaaggaaggcctcacggacacgctttcgttcctcacggtccatatcccagtacacaaaagcagatttgaaatctcctaggcgatctccagggaccttctcccatacaatccacgtaagatgccctctaggaactgcccctgacctactatcctgagacccttgcttgtatgctagtagtagaggtgtattttgcgagcatttatctttaagaaacttgtatgcctttagctcggggggtgtgaattcagtcgcttctcgggtgcgagtagctcggtccgcatcctcataacaggtgtgtggaacttgggcgtaaacgcgcataaaagcctcttgtccacctgcagcgttgtggcattcgaacagaacacatgcgtaagagtcgagagaccggtctgcgcattggtagctgtgcttattgaccagtctgtcgattacccattccgagcgggtgggcttgttgagggtgacctcgtcgcctggatcgagcccctcagggaaccatgaacgcgggacgtggtcgtcgtcgtccatgattaattcgataagagataaaagtgcgaaattatgagaaggtcagaaagcagaagaaaggtgagttggaaatgaagaaacttgatgaggaggatgaagagttgaaagtggaaacaaactatggtacttggtcacatgctctatttgcatatactgatgcgcacatacagattggtgtcaaaagcgtcaaccatactacggcaggttttagacgccatcgcgccaacccataataattttagagagttagagaattgattgagatttttctgccatatatatatttgccttactaccgtttttctgttagttataagcccagaatcgctttaaacttgactcttataaattttcacctttttatctgtcaggaccctagtactaagaaggctgatgcctgaggtattgcacctatcagggtgcgtggggaactgtggactaggcaggagccgtgtgtgctgcctgtacagccccctttaatcatatgacctacaatctgtatattatccttatatgctgcttctttagagaagtagctattagtttctaatataccactgcgtatactactgtctctatttcccgatcctccattacatacagcattcccttaggcattccatacctgggggtctcacagtatattagaactaatagctgcttctctaaagaagcagtatatgaggataatatataggttataggtcatataacccatagaggctgtgtaggcagcaatcattactcctgtctagtccacagtcccctacgtacccgggacgggtgcttccacgtaccatgacaggtatcatacttcaggcatcagccttcttagtactaggatcctgacactaagccgagtattctaagggaaataataatctaatgatattctatcgttagttcagctaaaggggttaatatagtagtcgcgcgactcgggtaattattaccccgattttcaccctaactatctatagcgtactcaccctactcacccctagtcgcgcgactgtaaagcagcgcttacccatttcttacccgggcgacacccacccaactattgactgtgtataagccatacgccggtgagttagtagttaggtgggtgactaccagcgaatcctcactgttatatgtttctacttttattttgctctttaaatcttatatagataaccaatgtagagttttagggaagcttttctttaccatacggatgtgttaatccatacagtcatagttcgattgggttccagatagtagcagataccaacaggccattgttcgctacagaaactctgccattgcgtccaggaagatcagattctctaatcggcgaatagcagtttagaagaatgctcaagattagaacaacctcgaaggagcagagcctggccttggcttcccatatcatccaaggaaatcatgctgccaggtcagattgaattttctttcctgttcaatctggaactgacgcaaaagttcgaagtcaatacagtcgtgctcgactccccatccagtaacggaagtagcatgtcctgtaaaagcattagacaagtgtatgacaataatgtatattggagagggttgactctaccttttccaactttgatcgggcttgacccttctattatgagatctcccccacacgaaattgcttgcctgaggtattcgaagcagtgcaggacatgtaaattccatttgactgcatcatgttcggtatcgaggtcgacaccgtcccgagcttgccaaaactgaaagcgaaccatattctgtgacttggagttagtcaaattctttaattagattacggacccaaacgtactagacagtgaagctggtgaaggatcgagatcacatagaaatcatgttgtggaggatcggtctcgtggggatgatcgaatggcgcgacgatgccctcgggcaaaccccatttgtcggggtcctcaatccagacagcatcatggcctataattatggagtgtgagtaagcaatgatgaaaaggaagtggtcgtcatctcaccagctaccaagtcatcccaatggtgatctacctctttcgaattcccaatgtacctctcatccggttgaaatacccttctaactggcttaaacacgtcttctggaataggggtaaatgtgccgagcggaaacttgccactgattttcggggcagtatatgacttccaatatagaactgcggtcgtagtccacccagttgcaaggattgagatgacaatgtataggagaagattccaatgcctatgatcttcaggcactggaagtgctgtatcttctccgtcattattgtttatttctcggtacttcgaatcggagcctcttggcttcaaaggccacatgttgtcagtcactgaaataaagccgagatcagagagaaagacaaaagagcggctcaaatgtttagagtcaaataaccacaagagttgcagcactatggtcaaagtgagagataatctttcgtaattgctccgctctcaaattgctacctagaattacatcctatatcctccgctaatcctgcatacctctctaatccagttgcatcaggcctcactgaagtaaggatagaaaataaacatagatagagaaattagagccctaccccgcgggccagatctgcaaatatccacatttgctaatatgaagagcatagaaaatgcacatggacccagctgagtaaccaggatatcagttcagccgatgcaaatacaatgccacctcatcctgcgatatgagtggtccatttgtaattatgtagggggctcgaaatgcagtcacttgcagtgttcgtagatatggccaaaggaggtatagaatgccaatctatgtactttggttaggttgtaatctagctcgttagggatgctacgacatgcatatatgtatgcccaggtggtatgcagaatgcaggtgggttcagctgaaagtgagttcatatatggcccaccttcattgagaaataaacagagccgcgtaattatgatcgtaattaattcactatctagaccagaactcatctttacttatttgttgcttgtttgaatatttaatacgctgtatgtactccgtacagagttatgatatcagcttactgccagtacgtacggtgcaagcgtatgaatcatgaatcataattaactaaaggtagaatattcattatgtactgcaataaataatatattcttgagacgttgagtacagacaaaactattatatgcaatgggatagatttcttgcaaagatattgctacatatacctcggatttcaagccgcgcttgatgaatttcccatcccttgccgccttttggtcgctgagaatcaagcacgcccaagtatcctgagctgcacgaggaagaaacagaaagaggctaccatgcgtccagggtaatatagatgcactaaatgggaccctatggtgtgcttccgttgcagtgtcgatcctgtcatatatacaaaataccgacctgtgtcgtctaggaggcaacctgaacaccaaggcgtggtacgtgagaaatacgaaacaaagacgcgaccccaagcgtaactaagcctttggacccctttaatgtttactgtgggtcgttagcgtgataacgtgatttacaagcgctttagggttgctacggataccgcggcttgggaaatgcaatcggggcaatacgttcaggcaagtgctcccatcctgtcaattgctgaactgtcaattgacttgtagggcaatatgcagttgctagtaacgagcgggacgggaacgaatccacttcagccatttgaaccaagaaaaggaatgctccaagtgacaagctaggcgttcgccccactaaagctagattaatttcaagctgtcctgtagtcgaacgcagaactatctgtacggttcaagcgcatttctggaatataagaaaagacgttgcagccgatcaccaccaaggcagaacggtaccgcaaggaatcggatgaatcacgggcagaggatatagtactaggagtgagttgtagatgtctgatatcttccttacgaaatacgatgctgtattatttacggccttaatttccaccctgataacccggtcttacgagaccctgccattgcaggacgcaaggaactagagaaaagtaccccgaaattgatttttaccgcatttagtacagcagatctcataggaatcttacacattctcaggtaacagacctaaaagagatagggaatttggccgagccaatagacttagctttgctcaatggccatgtccggcatgtggcccctcgtcaaaatcattcaggtcggcaggtgtatgcgtaagtctaccacctgtataccccgacccatgcactttattcgaccgatgctcgtacgcccaagaaaagatcttattgaaatcacggcattgatggacagctcccatgccgttgattcccacttcggacattggctcgaaagtagggtctgcatggcacatgagaacttgtcggatatagtcgaggcaatggtcgcggtggaaggcaacttcttcctcgtccatgtctttcacggataagggataataggcgaaccggagaaagttctatgcaagaggttagatattatatattgaacctgaattggctccataccagacagtgtagctggtggaagactgatacaccgtagaccaacgcagtctctggattatttggggcaggtagggactcgggaaggttctttgcagctgcaattggaagttccacgataccatcgccagctaataggtgattccgtcagtcgcgattctatttctcaagttggaatgaaaggatgcactcacggggagaaagtcgtttccatatctcgtctgtcttgtttgacggcggtccgccgaaataagagtgaggttggaaagtaacccggctggtatattgcactgtgatacaaagaactcttgatcagccggctcatttctctctacactctttctcaggagaagcttttgctcacagtcttcctcgaacttggttgtccacgagtcatcgcattgacattcctccgacttcctggcaaatgtgcctgtagcccacaggcctacagtggtaatgaatataagagcattgagggcgattagccaatttcgataattgcaaatctgccctccccaggatgaccgggaagattttctagagtagttccaagggtgaggaagtaatgttgagctcgaatcacttccacctgactcaataggaaggtccttgtctgactggaaatcatcatgagcggccattgcagatttgagggggggagataggacttgtcatcaaagttgaaagaatagatggatgggtattggatgaaggatattgatggtttcccaaaatatatatgtaagagaatatgcacgagacatcagaatgaattagacctacctaatcatcctacaagttgtccaatcacttgaaaccttttaatacagcccgtacatgaagtatatcagatttcaggcgctccatggtcttccctttccgttttagtgctcaccccttgccgcttttcgatcaggcccttgattattacgtaatcgataaacccgctgtaattttcaggtccggtatgattaaattaccgccaagagcgataactgaaaaatacagatatcgcgtcctagtggaattttcgtaaggaatgcccgggcgtttcaatctttacatctctcgcctttcgtttttcgcctttagtttgggtgatgtcatatccacgaccaggtggtaataaagtggggtgaaatcgccaaacgcgaatggcgaacatcatgcttacaagccctcgataggaaggaagagctgattgtcttattccgcgcatattctcaagtcaaacggtattccgtggcctcgcgaaacgtaaatgccaaggcgacttgagcacaatcgtaagtccatgctggcctagtcgacgttttagtctctgaaattaatgcggggtttatttcatctctaggctggtgagtcagtccactcgtaccctaattgttggcctttcaagccatttagacgataccatctcgcctttcgccctaaattgtttactgatttgactacccagccaaacttgcaggacaaggcgggtcaaatgttagtcttgcttacgtcgtctccagtcactgcgcgtgggctgattctgatacaacgaaaggcgacggaaaacgacccaaatgtaccccatgtcaccgcattgcgcgtgattgccattggcttcaggaaggaggcacaacagcagcgccggtagttccagtctaccaatcgagccctttgagcgcagctactccccatgaaaccgaatatacctccacggagcatcctgagtatgccttacaggacccacaagttgccaaattattccgccactacataacaaccttggccgcgtggtatgatctcaatgatagcaagcgccatttcaaggatgttgttcccgtcagggcgagatataatccgctattgctcagtgctattctcgcgtttgctgctgctaatcaacaccgcacccttggcgaagaagcgtatctggatattgctgaattctaccactatgatagtgtgcggagattgatctccctcacgaagaatatcgatagcattcctcttggcgaaacactcgccgccatttgtcttttgcgatcttatgaaattatcacacgttagtagttcccgacattcctaatttaagcttcctctgaaaatacagacgctaacagcttaataacaaccttagaaaacgtcagctctcagagtcacctgcaaggatgctattctctactagcgagtcagcgtatccatctcacagcagacctactcagcgcaggttattggaactacctccgagaagacatcacagtggctctcatagagcaacgcggtttaatgatcactctgtccaatcaaaatgccccagcagaaccaaccgaggatgcggactttgctagttccatcacattcctgctcggcaagattatcaaccggtgcctggcagtcgattcacaagcattagcccccctcgaatgggaagccatgaaatctgaactagacaagtggaaagcatcactcccgtcatatttcgacacgatacaaacccccgggctcgggaaacagagtagcttcccgtctatttggacactgcgaagctggcatagtgagtatactcgacctacttcttattcagcttctaacatggtaagcgtcgactctccattactaccataccgccatgggaattctatggttggctcagcctgcagctcaacccttgaaagctctacaacgcatcgacgatatggaatctatacagcggaagttagaataccacgcgacggagatttgtgccctggccctttcgagcgactccgcacccgtctgggtcaatgcttttggcccgattgcattctgtaagatttgtcaaacgttccctcgggctattctgatgaacgttgtgtatagattgcccttggcttcgcgatacccagaagcgcgtggaaatggcaggagagttggaaaagtgggggaagctgaccgggtggccggtttccattatagcggatgctctttctccgccaagcacaacctcgatgacactttagatctattaattatcacctttgtattctatggaaattctgtgggatggtagtgaaagagcttcataacactttatggtattcttatccacaaagtcaatatggatttcatctcattcttgtttgattgcgcataaagcagtttagatcaagatgaatttcaagactaccacctgtcctgtcgtttcgccatcaattaccagtagaataaacctcgcctaagggttctggttaaagtcgtaggcattgccaaagccgcggttcagatagcgcgacagtgcatccgacttgctgacccagtccacaggaacctccagctcagtctggccctcaataacaggcttgaggtcatccgcgaattcaagtctcatagggttgcgataccacggcgcaaagtggactatcgaagttagaaatactcagccggaggacagaacttcaacttactcattgccaacatgactcgggggtcctcggtctggttaccgactccagcatgccaaagacgaaggtctctgacgaccaaagcgccctttggaacgacgggctgacatggcgggcgctctacacggcgcttctctacctcgtcgagcttgatgcgaccactggcacggtcgccgtgttcgccctcttggagatgtagacctgtgtcattgtgtgttcccagccatacctcagtagagccattcgccggggtcatggtgatgagagggacattgatgacgtatgcaaatggatgaattggatgggcaaagtctgcgtctgtgtggataggctgggacattggagggttctctgcagttgggggcattgcagtatttcccgagcaaaaggtccattttgggcgtggtcccagtgctgatgtggtgatttgagttgcgatggggtctgagtaggattaggagctgtggactgaagtgcagttggggctttgtgacatactcatgaaaatactaggctcgaacaattccctcacgggaggagcgtcttgttggatatttcccaggttgtagttaaatgggatgtcctctttcttggactggaggtagtaggcatcttcgaccatctttttgttcagtcggttgaggcagtcgtggggaatcacattttcaacaacgacaagtccatcccggtgcaggctgcgcattgcaatctctagattctggtgtgaaagacgcccattcttgatttcatcttgtgatggacgaatggatttcggataacttgtgatcttcccgagttgggtcgctagagatcggatctgatagtgacggctcaacactgttggagccttgaagaggatttggctcatggtgatgaagtgatatgtactaggagaggggaatgtgaagacaatttcaagagatcatgaattatttatacatgtcaagtcagtttaacgagataaacattgcggagacggcctataaagatgtttgccccgctagtcttttcgcctttcctcgcctttcggtggtgccactttcgctcgtatgtatgcggagagtccgacttgccgagggtaaatcgattatattagcttttaaccatagccgtttcccctactttgccaatcgcaaaaccagttaaatagcctctcaaaatatcgcttcgctaaacggctcgcatttggtggattcgttcgcctttcgtcccattaggcgaaagcgcaggttcccttcaaccccgcacgcagcctgtttctatgactcctaactataaattgtagtaatttcctcttaaagtccagaaaatgacttctcaaccgaagctcctcccgcaattgacctccgccaagctcttcctcaccgaagctggactcgaaaccaccctgatctacaaaaagaacatccacctccccagcttctccgctctccccctcctcaatacagaagaaggcacagaaaccctcctcgccatctacaaagactatataaatatcgcgctcacgcactcaaccggcatcgtcctcgaaacacgaacatggcgcggctctccggcatggtcttccaaactcgacctttccgtcccgcagatcctcaatctgaaccgcgcggcagtgaaaatcctccgtgatctcagacccaagattgagacgccatctactccgatcgttatcagcgggacgctggggactctccgggatgcgtaccaggattccacggatacggtttctttctctcaggcgcaggagaattaccgcgcccaggttcgcattttcgctgaggaaggtgtagacatggtgtcgattatgactgcgacgaatctcaatgaggctactgcggcagttagtgtggcgcgtgagtataacctccctattctcgtctcgtttagtattgagattgatggacggctgcgggaagggaggacgcttaaagatgcggtgcaggaagtcgatcgtcgcacggggaactatacgacgtatttcggtgtgaattgtgcacatccgcgtcatatcaggacggcattgcgagatgttcctgaggatgtgaggtcgaggattggggccattcgagggaatgcgagtcttaagagtcatgatgagcttgataactcgctagtgctggatcggggcgatgtttcggtgtgggctgaagagttcaatgggcttttggatatgttgcccgaactgaaagtcgttgggggttgttgtggcacggatgaagagcatattgagactcttgcgagagaaatttacaggtaattcctggttttaccgaatatttacatagctggatgtatagtattagatttatgaatagaattgcaaagaggagaattaaattcgtattccagctcacagcggaagaccatagatatcataataataataaagatcattcagcatacacaacatcattcaagagccacgctcaaagcagatctttgaagtatccacaaacaccaaaaagaaaatcgtaaaaagaacatcaaaatcaggcctcagccttggtctcgacactctcgtggtgcgtagcaatctcagccttcttctcattggcatcgatctcgagctgctcagtgaagttgacggaaggaacccagccaacagacttccaagcacgaggaatcttagcataaagctcatcgacctgctcaagcgaaagacccttagtctcgtagatgcaggtgtacacaaacacagcacagacgaagcagaatccaccccagatgaagaacaccttggactgaagattggcgtttccaggcccgctgttgaccatgtatggcgtggcgtaggcaatagcccagttgagcagccagttggtggcggtggtgatggagagacacttggcacgcgccttgagggggaagagttcaccagtcacgacccacgcaaccgggccccaggaacaggcgaagaagaagatgtagacacacacgaaggcgatgaggactttgttcgagatgtcggagtcggtggctgtgccgacgatcgcgacgatgagttgcgagacgcacattcccacggcaccgaacatgagaagagggcggcgaccccatttctcgaccatatagagaccggggaaggtggagatgacgttgatgatgttggtgatcagggtgatgacgaaggagttttggatgccggagttttggaagaaggtggtaccgtagtagactgtttttggttagtgctggaaaaggtggaatgggtgagaagggaacatacagatgaagttgacaccagtgagctgctgcagaccctggatggcacagccggttgcgagacgcttgccgatggatccacgaaggatctcgaggtaggtagcacttccgagacgcaattcgtattcgtggtttgcctggatctcggcgagctcagcgacaatggcgggatcattcacgtccatgcggcggagacgaccgagggacttgctggcttcctcgtagcggtcttgcttgatcaggaagcgaggggtttcggggaggatcagcatgccgacgacgaggatgatagcccaggcgaactgcacggcgacggggatgcggtagcagccggtatcatcacggtccttggtggagttgttgacgatggcagcgagaaggagaccaactgtgatggcgagttggtaggtgccgacaattgttccacggatccatttgggtgcggtctcggactggtagagggggattgttgcggagaggagaccgacgccaaaaccggcgaagaagcggccagctacgaagagagggatggaggttgctgcggtttggaggacaactccgaaacagaagacgaagctctccatcaccatacccattcgacgaccaaatctatcagcgacaggggcggcgcctagggcaccgaagaaagtgcctgccgagaggagagagacaatcattgatgattgtgcggcggtaacatcagggaggtgatccgtttcgttgatgaagccagtcgagaacatctctcgccatttcttcatggcgaggataccgctgatggtaccggtgtcatagctagatggtgttagacctgtcttcgagaagtatagaacttgagtggtacatacccaaagagaacaccaccgaatgcaacaaacagtccaatgatgatagccggggcagcagagcccacggcctcagtcggcctcttcaaagcgaagcccattgcgagtgtgatcacgaagaatcaagtcaacccaagtaggtatgtgtcgtgtgagtatatagatgaacccgaaagtatagatgactcagagaagactgatataggagagaaaggaggaagcaaggtacacaaacaaaagaagaaacccggaggtcaatccccctctatttgtacttccccagtctctcaaccacatggccccatgcttctcaagccggggaaattttcaaccaaacctgaaagcagcgcgggggaccgaacttgccttggaaggcgaaaatccgagtcctgtccaatcccagaacagcattccccccattgtcacggacttctcgatgttttgggcctggggatagagtttagaccgaaactggagaagctaacgtggttaggggctcaggccccggacttcaaccgggatggtcattggttcgacgcaaattggctcgtccccgaaccgagtttgatttttcttccctgagccttggcgtgcagttgttgtgctttgtgcagtaggatcggcgaaactacacggagatatagaagtacatggaatcagtatagtcttgctgtacatatctactgcatatggtgctctattgttactgtttgttgtatatcctattatgtatttgcgtggcaacttagggctgacatgtcttaggaatatccgtaaatagcctttccataccacacgacaggccgaaaacagcgggggggccgggttaagccaatgccgatcggtatcggcgtgtctcccgcatcgggggagaggccatgtttatttgtcacattttgctgcaattcctatgtcattttaatttagacatagttctggagcgtgttaaattagattgcaaatgtaatatgtagaaggtcagagatttcaattttcaaagcggatatttttcccccgtcttttcccctcatccccagacatcagtttccccagacctcccccagaccttgtatggagcaggggcccgaggtattgacgcccaataagctaagagttggcagttacgaagctgttcaccggagccagaatgggaagggggcaaagcatggccagattaatttcccccagagcatgaccttcgcgaggatctgcagaagccagaactcgccaaaattgccggggaaattttgaacaaatgcccagctggcttagtcccgcgccagtgcgccattttcccaagacgcggattggacagaggacccgaggctctcccgacgttacactcccggagaatcatcggagacacctgtggcctactactagctagatcggtattggactcggggataactttgccggtcaatgccaatgccggtggtttttagcgaggagtggcgcaggtcgggagctaaagtagcgttagctctaggccgttcgggttttgcctaggtcaatgctaaaaactgatcacatgttcgaaattagactaccgagtatgccaattcggcaggttccgatgaaatgcttgtctattattttgatgctcgctgaagaagaagaaaaaaaaaactggccagactagctaccagcgccagatcaggatgaaatacacagtcatcaccacttgcgccacaaatttgagggaatggtatagatcccggacgatgagagagacagttgagtgggaacgggtagccgaggcggggcgccatgcagccttgtcctttgaggcggctccgaagtccccgtctataccccgatatgcatcttctggggatttagtgccggggtagcgggtggaggctgtcatgccattgcggctggctaaaccacccgccgatgagagtgtagagctagatgcaccggaggtgtggtgatgtgggagagagcgcggttcggaaagggggagaatcgcaccggaaggggatggttctggggtgtagaggacgcggtagatggaacggaggaggagggtggagacactgatacacaggataatgaggtagtagatgaagattcccagctggtctgggaggatacagaggtggttttgcacagtgggtggtgatccgtcttggatggatttgcctgtcttggggtcgattggattccacagactggtaagcacgaaccccgggtggcggactcccatcgcccaggaaatgcttttgacggtgatttcattgggcgagccgttgaattcccgatgggacacttcacagtagtcatggtcgtcgccggaatacacctggacgacattgggtcctgccttggaaaccaattcggtggaaatggtctgcgtgaggacattctggtactgatagcctccggcaattctcaaagagttaggctcgtcctctgtcagttcctcgtccgatgaagacggcgggtagtgttctcggagaggaccacagggagtggctggttcgcggtagagcgggacgtgtgtcagaataatagtaggaaagccgacgcctgctggctgaggcttttggtggatggcgggctcgacagcgtcggcaatacgataatcgaagatagtatgctcctcggttttgttctgcagcattcgcagctcgtccgtctccgccttggctttgtggatagccatcttatccaggaagtcatctgcatctttccagatcgggcggagagaatggttctcgctggctgttggagagctgcccgtcaatggatcgggctggtccatcgcgctcagcgagggactgtccacggacacgaaagtatgattcccaataacatcgacgcggttggggtttccaaaaaaggactcgaagcgatcacggacgggttcctggataccgttaccgaacccaagatcatggttgccaggtagactagcaatcattctgcgccctcgtccatcgacagggggcttcgcaaatttctcccacgggtccacaaaaattttaataaatcgcccaaactctttcttccaaaaggagtccgtatacttcttccaccgcggttcggggctgctagttgtagccgtggcccattctctgccgccgtcgaaaaggtcgccaagaaacagcactgagtccggctcgaggtgatcttgtatcaaggaaaatgaccgtcgcatatattggtcggtgtatttgaccgtcaacgtggacacaggccatggtcgaccggggtaagtgtggggatcaacgagctgggggtcggcgatgaaggcaatgtggtgaggtgtggcaccttgaggctagacattgatgttagtaccagccagggaactgaattgcgataggtattccgtcaacttacccattcttcccaactgtcccaaaggcatttgttgatgctgtcctcaaataccgtgcgttcgccccaccgaatcgagaacatccacagtaaaataatgacattggaaatcgtaaatatacgtttgacaaggttgatagcagtcggcttaattccctcacttcgaatactgccaattctccggctgacactctccgtaagccattgtcttgctgtcgagggaatgcagtcccacacgcgactgaggatattttgcgatctcgacgactgatgttggttgtaggacggaagggaggaagcgcccgtgctgcgtgggtaggcgaatttcatgtttggcttagcttgacagcaagactaagttaggatagggtggctcgaccccagacgagacggggctgatcttcaaacaaaggaatgactggtcatgctctgggcatacaactgaaaagaaccaaaagaatgaaggatgaaggatcaaaatagtaaaatttcataacatggtgttcaacttgaagacagggggattaactggcaattgttttaagcttcgggtcaatgtgtcgatcgccagacatggggcggtcacgtgtggacccttaacaaacagattgtctacaacatacggggtacaatataatttcggcacatttccaaggctgatttgcaggtcttgaattagagataagtagaagtacataacaaatgcagtccgaaggatacagcgggtcagcgggtctatgtccgcacattggatgatattgcacggcatgttttgccatgcatttcccaaaagactgtgtagctcaagggaactaccacttccaagtaaaaccagacaatgaaatgggaaaggagtaggacaggtctctagattctgcccgaacgaggtgcagataaagatagggtatctgggtaaaaaaaaaaccgtaggggtgagatgtttagggtaccaaatgagaaacgaaagtgcgtggaaagtcaccacatgggattaagttcactttttagggcaacactggcctccttcggcacagttgttgtcacactccagaaggcatgcttgagggtcgccctcccgaacactagcagcacgactgggaatgtggtcctcggtgtgagaggatgatccttgtccattgtcttcgacatcactttccggcgcgaactcaggttggatagttgaagagtgaataccgtaagcatggagacagcgtctgacctgtctcgccagacgcatgtacctctccgagccttcacccttgatctcggtgtccacttggagatgaatcgaagccacgaccttggtgtcgctgagttgccaaacgtgcaggtggtgtgatccaatgacaccaggaaggcgctcaatgtcttctttgatgtgatcaatgctcatgccggggggcacggcttgaagaagaatacgcgaggcggccttacacaacggaatggcagatgcaagaatgatcactgtgataatgagagaaatgaccgggtcggcgtaaaagcgccacttgtagtccgtcaaccagatgataagcgcggaaacgatcacaccgatgtttccgagggcgtctcccataacatgaaggaagacaccacgcatgttgaggtcgtggttgtgacccttcttttggccctttggcttaggctgggcatggttgtgggatttgtggacatcttcatcggggtgatggtggaccttggtaggagctccttcctcgtcggtgtagttggttgtgcgatcgcggtgactcaaaagacctgaacgctcagatggctgctcatcctcgtcatttccattgtccgaatccgacgattgttcattccggtattgactagccgcgataatcccttgtctcagtctctcggggagcacgggaatatcatcggcgctcacgaatccacgtcctgtcgaagtgctgtagctccttggcccgcgggtctggaggtcgcgccgttttcgggatgggtcagtgggagattgggtaagggcattttgaggcaagcttgcggctctgtccaaaaccttaggcgccgccaagctctcactgtgttcggcgatgggtgtgtgatcgtgatcatgatcaccagcctcgatgtcatggtcatggtcgtgctcatcgtgctcgccaccgttgccgtgatcgtggccgccaggtccgtgggagtggtcgtggaacagtgccaatccaacaatattggaggctagaccgaagcagccaacaatgcaaacaaagcgcgggttttgcacttcctggggctcgaacaatcgctgggtcgcctctaagaaaatcgacatgcacagggcgactaggaacacgccattgaccaaggcaccaagtgtctccgctcgttgccactgtatagagaaaccaattgtcagatcgtcatcgtcttcgggctagtattgacatcaacttacgccataggtgtaggtgttggagctcgtctcccggttcgcaaccttcacggcccataatccgacacatagggataagacatcattcaactattcgggttagattcagccaaagagcaagattgtagatggtggcgtaccatgtggaaggagtcggcgacaagggcaagagagtgcacggcataacctaggaaaacacagtcagaagccggtcgcatacggtcaaattgccaaaaactaaccagtgatcaattcaagcaagaaaaatgccgtatcaatgaccagcaggatcaagatcctgttcgttttggacaggcccatggtagcgtgaggtttgtggagcgctcaatcagagctccacgggataaaaagtgtaggtttataactgcagggcacagtgaatatttaaataaaaggaaaggaaagagggaacgacagagaattatagagaggaggggttgacgcgatgaaaaatacgtaaaagcgccggggatgaatcgaggccgtaaacggccagggcggaaacacctccggcctccggtctggtccgtggtggcgagactctttcaactttgcacttttattagtcggtcaatttcgcatcaacatgtctcagaagaagcgatgctttgattgagagtctttcgcttatttcgcatattcacagcttgaccccaaagagccccggggtccacctcccgtttacctgatcggcgggggactctctcattggaccggagcctcattattttcattgttgtggcttcccatctaatcctgagtcaagctcttctatcctctacctggtgactagctacatgtatacaccgttgccttacagacagtggatctatgtcctttgagctctgtgaacggacccattggaatagctgcattaggatatcggtatggtagcaccacactggaagttataaaagcaactggctcatgtgggactgatcactgcagctgcattgcacacgttatgggtatgctttgattcctcttctttcagcctatttacggagtatacggctaggtacgcagttcctaatgtacttatctgtactccttactcactgctaagcttttaggaaactctcacatcgggagctcgcataatttcaaagccctaactcatggtttccactattgcctagaactttcagcgctcttctatcggtggacacgtccggtacagcgtttgtttttttctttttttttgcaatatgaaacttagattagtgggggcccatgaagcagattttcaagactacgtagtacatattcacacgtcaggtataatttttaagtggcaggatagactgtgtttggttcacgctatatctacagacttatcatgctaggagatagtatcacaggagcaaaggagcagtagagtagaagcacaaatgtatactgacatgtgatggcgcttatcttcctagtgtttattacctctgtcgccaaactagtcatagaagctactcgacgctattagcaaactatgtggaaaccagcttcattacatgaattagaacgccaatcataacagtattctatatagaaaatcaaactacttgtaagttgctcctgctctgtactttgtactcagtacacattccactttcaatacgacgctggtccatctgtgtagcttgtctaggagaaagctccgcgccaattggtgcactatgttaggccaatgggattgtaaagcaataataaatggcatcgggtggtttgtatattgggttagtccgtaacggatacttaatctgcgggatgataggatatataatcgctgctagttattgtcacgtcagagcatatgtataaaatggtgaaattgatgtcagctagggaaaaataaacagcctatatttatgctagagtagttttgtatattcaaaagtaaagatagtccaattgcaacaataaatgttcctaatgagccctaatgagattgaatgtcaacattgaaagtgggtctgtcggtcctatctagctatccgcgatcgagcctactcggcataagtcccacaacagtaggccggctggcccaatggcaaggcgcttgacttcgaatcaagagattgcaggttcgacccctgcgtcggtcacttcttttttgtctttttggccctgagtggtggatggttgtgtatagtttttgtggaggcggtgatataagcggtaaggatatagcgataagagacaaaggaccgataactaggcattatacgcaggtcaaatgatatcaaaatgtactctgcactacatatatcaatgggaaaggagctgttctctaaggaccattataatggatattttatcagctcaagcggcaagtaagcctgcgatagtggagtatgatttttagttcgacgataaaccaggagaagttaggcagttaatttacatgagccacatgaatagagctagctatgcaagctgtagatcggagtgggaataaagttcttggtccctgacattgacaccatatgcaggttttagatggtgatcggcattcaaagccctacgcatggctggggcagtgcttacaattggaccattctcgacgctatttaaagacttcattgcgagaatacgaaacatatgacagaaatgtttttttatttacaatacaaccagatctatctaataacacacaaactctcacttatctaaaacttaataagcttcttgcgaagtgacgcaattctgttggttgcattagagaatgcacgcttgtccaacgaaccatccttcaaagcagcagccagagcatcgtaaatagcctctccctgagtgacattcctcccactggcaagcaagagatccataccagcctgagcagccaacaatccacggggaccctggtcgccaaatgccaccagcgatcccgcctcaatagcatcggtgatagtgacacccttgaagccaagtctaccgcgcagctcattctggataatggccttgctcagtccggaggggtaattggcgtccaaagcagggtagatagcccacgaggccatgaccatgtcgacaccggccgcgatcgccttcgtatacggggccatatccaccgagcggagctcctccttggtgaagtcaatggtgacgggctccacatcggtattctcggtcgtgcttgctccacccaggccggggaagtgcttgacggttgcgacaacaccgtcaccctgctgggcgtggatgaatgcagatccgcatgtcccaacgacgctggatgagttgctgaaggagcgctggtagttatcggcgaagtccccggccacgcggaacacatccaggacgggggcaaggttggcgttgttatggaattccttgagggtggtcgcggcatcaatgcccatctgcgtcgcggccgctttgtaatcggcggcttcaccgactactttggcactcgacactggcccgccggacaaccgacgcacctctccgccttcctggtccgtcatgacgagcaaaggactgccggaatagtacgggctttgcttgtaggtctgctggagattgtcaattgtggtggtgaggttatcgctgacattctcgccgaagaggatgataccgccgactttgccttccttgatcagctcgaggagctgggcggagggctcaaggccggggtaagagtagatgacatgggatccaatttgcgcttggagatccgtcggggaagcagccaaagctgaaggcgcaagggcaaggaagaaaggaagaagagattgtgtgaacttcattttgattgtaggctggttaaactgtcaaaccgggtatcccttcattgtctatatatcatgtctcgctgtttatgaacacattgggaactccgattttgtcctatgattgccatgatagtccgaactgtccctgaatctgttgggaaattgcgaggggtgttacattgattagattgatcagcgtggactattaccacaaggggaaaccccgcatatgaaggttactatctgggagccgagatggccacgttttggcgttttggcatgattgcaacggtcctcggcacctaaggaatttatattgctttttatgtaacctggttcatcaaagatagttttgggactaggagagatatatttattggggaaaggaggccaaactgcaatcctaaccgagggttcgttgcctgaggtatccactctaacggataggcgtgataaggttccctagtttgcgattttgtgaagaacatgctgcgtacctgattgtaaccatagattgaattatggagtaagtcaaattaatctctcggccgaaattgaaaacaatggaatttgtcataggtggtgggcagtagcatttaagtagcgactatttccatctcaaagcacaattctcaaatgcggtttctttacggttttgaataagagttccctaggcgtgccaagaatctaactgcacgtgggaaatcttatttccataaataagcacttttcccctgggggcttcgaaggttatcaaggactggtacgggtacgaatagccgccatacatctcggaattaggtatatggcacttgccactgactaaatatgtttgatacccacgatcactaccgaatttgagataagcgaaggacataaaacaatattcgggatacatatcacaatagcaagcgccttgaggtccccatcactgacaaccgggcccaagttgtcttggaagaaagttatattaatttaatgttttgtaagtaggtttcagcagatcgaagtcaatattggatgcttggattggtttgacagaggatgaaagatattcactgttgatggagttggatggaacagtcgagtgagtggggtccaaggtggactgacgaggactgtgattgaaagtgcctattgacctgacagaaggaggggcaagaagactcaagtcctgagagtgtccttgtacaatggaatccaagaagcgacccaatttcgtaacctaacagacaaaactagaccacagtgtatcctttatcaagaatatgatcagccccgataacagaatagtgacctaaatagccctgacgtgtggacataacgaaggaacccccaaaactctatcgttcttaccccagatagccgagccgcatactccatcgccgatctcgcaggcatagtccgtcagtgaccaagatagagccaatggcaacgaatccagacctgtttaggctcatgcagatcgtccgagggtagtcgtgaccctgacatagagccatagtatgaactgttaaggaccagtcttcgcctatcctgtctcgcccgcccgaataaagtcaccgagtgtgtggtcaaccatgtactgcgtatcgtcaataacagccggagtaacttgctttagatgctgagccgatcggatgggtctctccatttctgactcaaagaggtaaaagcagttgcatcctgtgatcaacttgggaactgccggcagaacttcgacattttctggttctgtttccaacacgatgataaaatctccccaggattagacttccgtgataggtgtcaagtcgaaaatcaaacccactgctggttcatcgtcccaaatgttaatttctatcaattcgtgaacgactgaagtggtatatagggatcataggctctgtcgtggggatcgtccgtcaagtagcagggtacatgtgcactttgtcgagaccatggcttcggcggcagtttatgaaaacgataaattaatactcgcttgttgcactcaattgcccgtgcttttggaaatagttcgagaagaatttggtagctgcaggttcaaagaatttcttgggatattcccgaagatcaaacgtcgccattaccatctgccgagcgggtcgggtcgtaagggaagttggatttcgaaaccatcttgtgggggacttgtgtcaggaaggcctctctcgccttgggaggggtgatccttggactgtggctgccctgcataattgagggtggatctcccgcccattgctcctggttagtgaggtgggggaaggtgatcaagtccttcggtggattctggtgatggtatcatctttcatctcttgtttagaagctatggggtagctaactagttcagctgaccacatggtgatcacataactaccggatggtgacattaaatcacgtgcttcttctttatcttagactcggaacattattcacactgcatatgatatatcactttcggaactacagtgtacatatagtgcagaatcagttttttccatggcgtgaaacaaaaacgtggtacgtagctcggagcaacattggaggccacatggcagctgccgggtaatatctcaatggctcagtttctttgaaattctaggatctttggctgctagctactattctctaaacccagttggattatatgtcgtaatgaaccaattctacacgaagctcaagctgtaaggcccctgagatgctcaacgtggccgattatcagccccactcaccacttcccaaagaggaagctcaaagtagaagtcttggcgcggagattaagcactctaaccgacaaatcatcttgcttccctcgtgctaaaaattctagtggtattctagaaatgggtaacattgatcagatatgttgtacgcgattctgccaagcagctgaacccttaccacaactatcaaaattccaagtaccaaagtgcctaaagaggtatttctgtagtaatagtctccaaagaggggttctcgtatagctatagcgcgaggaacctttataggctgttcgaagacccttcgtgctatagcactacgataacgtcaattttagaagttgaattaggactatattaacaatttttaccggatatcgaggtaagaaacaaagattggccgttatgcaaataaccccctaacgaatggtagaattaccactaagaatttccattacggcgttgtaccccacaccccaatgacctcgggttgggttgcttggcaagagtcgcgtagactatttactgggtctattagtctgcacggagtacctggagggcgtcattgcttaaaaatttcaccacttggagacttggagggcgtcattgcttagaaatggccattgattcaccacctgggcatgggctataaagactttgcaacaccacgcatacaatgctgcactgccttataattcaacaccaagaaaagacatccgcatctgataaagaatcatgggcgcgccagaactttctagcccgactgatgaggctatacagcatgatccggagcaggccaggataaatcaagagaacgtcgatttggaaagattgggaagagagcgcccaaaatgctttggtggcgcttggtccgaaatctctttttgtctctcgatttttatgtcccaaattcttgcagtcagtcacgacgatgctcctggacaatgaggaaaaattctgacatttaccaggaatactacatctcaggctcaaatgtcctccttccaacgctcgtcagagagctggatctccctaaagcttcggcggtatggccgtctaccgcactgtcgctggtcgtgacctcgacgctccttatatttggcagactaaccgacatgttcggcggatatatcatctacagcgggggagctatctggctcacgatatcctctatcctatgtggtgtctcccaaacatggctgatgttgattatctgtcgagcgttgcagggctttgctctggccgcctttcttccatcgggaatgatgatcctcggcagcacgtacagacctggacccagaaaaaacatcgtttttagtatctatggcgcatgtgcggcgctgggcttctttgtggggattttcttctccggactcactggtgaatatctcacgtggagatggtacttcttcttcggagcaattctctccgccatcacatcagctctgtcactcttctccattccgcgcgattattccgagatgaggaaattgggcatccagatggattgggctggtgcgtgtctttccatcccggcggctgtgttcattgtttttgccattgcggacagttcatatgcgccgcaagggtggggaacgccatatatccctctgttcctcgctcttggacttattttcctcggaatgatggtctatgtggagggatgggtggtgaagaaccctttgctccccggtgatatttttcgagttaagtatatgctgcctctggtcgtcgctctgctatttctttatggcacattgggaatattcctactctatgccgttctgtagtaagttatatcctaatatcgttcagactgggcttttctgacaacagctatagcatgtctgatataatgggtgcttcgccaatgcaaatcgtggcatgggctgcgcctatgggaattggtggcctcatcctctcagttggaggaggaatgatcttccacaaagtcccaggaacgatattgatgctgatatcatgtctcggctacgtgggttctggattgttttttgccgttattcctcttggcggaaattactgggctttcgttttcccgtcgatgatatgcggcacagtcggcattgatatcagcttcaacatcgccaatgtatttatcacgacaaaccttccaaaatcaaggcaaggcttagctggtgcattgatcaactgcactctgcacatggggatcgctgtgctgcttggtttcgctgacattgttcagacccagacgtctgacctgggttctcggcgcagctacaaggctgtcttttggtatcaaaccggactagcgatactgggtcttcttatcgtcgcctttttcgtgcgaattcgagaggctaagagtgagtttacgcttgatgaaagagaagcaatggcagcagagggaaatgaaagagctggcgaggtcggggatgtttgataccctatgcatttgtattttttaaaaataatattagccctctatagaacaagacaagaccctcgtctgtgaaaatttcaaaacttcaatatcgagcacagtcgacatcgccattctatttatatagcagtgtatgggatctccgattggttaaccgaactacaatcacatgttcctgaaagctcacgtgacataactctgtagccttggcgtgcatggtgcatggccctggcagcaatccgtggtgacacttgatgatctttgagacctctagtctccgtgctctactcgccattcccggagcctagaaatatagatcacaatgcgcccttttgattccggatgacgagtgagattcatgacaatgtcagtcacaacaattccacttgaacctttcatatcgaccgcacgtgcggaaacgagtcacgccgacgcagtcatgcgagacctccaatccgaccgaataaaaccggagaagaaagagaacgtgggattgatggtcggcaatagtatagctgcgtcggccatggatttcactgggacatcatcgtttagggaaaaaaaacgttcgtccggccttaatttcctgactgcagaacacccgcttttcccacccatgccctcgtatgggccaccatccgcattgcgcagggtccaatactatgcgttcatcgttgcttcattctttctgtcgatatgcttcttgacggtcatattcatcggggccctgatccacacagccggagtcgcaatttcggaagctcgtctgcgattgagcggccataacccggagaccatgaggtcgttctatacagaggaacaggcgcgcaggaaggcacgggcaaacgtcgataggagatgggctctgcgccaacagaagagggacatggacgaggaacagggacccgaagaatgccaagaatgcccgtcgttggaaggaggcaaggaccctctggttggcgatgtcgcatactatgcccgccgagttggtcttgatgtggagacatttcgtgtgcagacagaggatggtttcatcatcactctgtggcatgtgtacaatccccgggagtatgaggcattatcaccagaagagcggcgtgagcgtggtcccgatgttttcaccaagccaagattgtcgagcacatctcgtccacaatctaaccgtcggtatcctgttctcctgatacatggattgctgcagaacgctggcgcattctgtaccaatgacgaggatagtctggcattttacctctgcaagtccgggtacgatgtttggttagggaataaccgctgtggatcgcacccagagcacaccactttgtcgaccgacgacccgcgtatgtggtcatgggacattcggcatctcgggacactggatctcgcagcactcacgtcgcgtgtgctctacgagactgggttcgagaagctgggtctagtgtgccactcccaaggaaccacgcagaccttcgttgctctagccaaggagcatcgtcctgagctgggtgaatacatctcggttttctgcgcgcttgcacccgctgcatatgcaggcccgcttgtaagcagaccgtatttccgattcatgagtcttctctctccggcgatgttccgaattgtcttcggaattcactctttcattccttccatgatgaccgctcggcgcctgctcccgcctaggatatatggaaccctagcatactgggtgttctcctttttgtttgactggtcagacacgcgctgggagcgtgatcttcgccatcgaatgttccaattcgctcctgtgtatgttagcgccgagatgatgcgctggtggctgggaagcgacagctttgcgaaacataaatgcattttgtccacagataacgaactccttcaggagccaaacgtgaacccgcatacgcgagatgctgtttctgagcatggtgatgatcccagagacgcatgtttgggcccggcctcaagcccctggtatggcccgaggacacccccgtttgctttctggatcggaggctctgatgctcttgttgatggtcgccggcttctgaatcgctttcaaagtggctgcgagcctcatgtgagtctcgttcattcaaagatcattgaagaatatgaacatctcgatgtcctttgggcgatggatgcgatcgatcaggttggcagggaggtcaacaaggtcatttggacaaccatgcctgatgacgcacgtcagatatgtcgcactccgcgtggtttaaccctagacatggtagacagaggttagcttatatttgtttaggcattcatatattctacttcataaagagggctttcagctcaacaacacttcttgtttattcctatgggacactattactgggaaaacatattttacagagaaggactttcttagtatgaatgcgaatatgaagaatgcgcttattgcgttcatttattcctttttgaggcctgattcaacttggcagacccaggtcttcaggcaccgttcaaagatcacctcgatcgggtcgcaattcaagatatcaggcgcatcctggagagcacggcgcagattcgcccgcccgtattcagccatgttctcatagacctcccaccgagtcttatcacccaagacggcctccttcaacattggggtaagcggatgcagggggtcgtccgggcggcgagacagcgatttgacccaatcggtgtaggagaccccacgcagcggataccgcgaaatccgtttgaggatctcgaaactagtgttaatgtcgatcgcgtttgtcagatcgggctgaatgagattataggcatggccgaagttgttgtgcgaggtggaaatgtggagtatggcgttgacgatgaagtctacaggaatgaactccttgcgctggttaggcagaatagggaataatcccagagatatacagctagtgaacagacgagaaacaaaatcgtccgggttgcagaggcctgatttgctgtgaccgagaacgaagcccggccgatagatggacacagggaagccgttgtcgatggcactccaaacgatcatttcagccacatactgactctgggaatagccggtatcatactgcatagcggccaaatgtggtgccgggcgctcgtcctccggcaacatagtggccccagtcacatagcccgtcggcccgtacgcggcgatactggaggaatagtgcatggccttgagacgctgatgcttggcgaattctagcatgaacagtgtccctatgacgtttacctggcggtgacttgaatacggagcgacgtaactgaccttggctcccaggtggaagacaacactcgcccaggatgcccagtggtcgtattgggtcgtgtcaagcccgagtttagcaagagagaaatcaccagggactgcaatgacctttcggaggtccagaaacagcccgtacttttcccccgtctcctgaatacggcgcagggcagttgtctcgtcctgcgcccgcaccaggcacgcaacttgcacaacctctggccgcttcaccagagcgtctaacagaaatattccgatgaacccggtagctcccgtaaggaagacccggccctcatcggggctctgccaatggggtattgtagtgtcttgtggcctcaggaactggcccagctgggcatcttgcagccatatttcctgctcggactgggccgacagatcgtccccattcaattgcagccgcgtcaccagttggactaactgctcgaatgtcgagttctcatacaacatgcgagcctgcatcgaaaccccgagcgcttggttgatgcgggtgatcatcatgacagccacgatggaactgcctccaagggctacaaaatcggcggtgggtaccagatgctccgccggtaagctgcagacatctagccaaatgcgctccacctggacagctacatcatccgaatcaatctcgagggctgcggcaaaatcccgcgagcgctcaatctgctcgtaccactggcgctctagtgctctgcgatccgccttgccggtcgagcccaagggcaggtcgctgattagttggatgcgcggcaccatcagatgaggaaattggctgatgtaggctcggaggatcgctccttctgtggactcatgtgtggtaggaatgcagaaagccagcagaaactggcctctttcgacttcatccggggtgatcttgattactactgccgcactaaccagccgggtctctagtaggctcgcctcgagggcctcgagctcgacccgttggccgcggatcttgacttgattgtcttttcgaccgaggtagaagtgcactccattctcatcagtccgcataaggtctcctgtcctgtacacatggccaatacctcgagtggtctgactcttgagttgaggcattgtcacgaaggactgggcagtcttctcggggttgccaatgtagccacgagctacaccaggcccgcctaccagcagttcgcccacttctcccggctgagccaaatgtcccttctcattaactaggaaggtctccaagtttccgatcggcttaccgaccggaatttcgccacgcagagcttcgttctgactaataacatgccaaagagtgtagatgctgcattccgtgggaccgtagccgttaatgatgcgtcctggggccccgttatcgaagattaaccgtattatatcgcaattaatcgcctctccgccggtaagaagtgtatctagtgtggaaaaggcatccgaacaggcgaatgcagtgactgtgaggagagaagtggtgagctgtagcacattgagcttctcagtcttcacgaaggctcgcagagccatcgggtcaagcaccgtctctgccgggatgaccaccacggtggctccacggaggagagtggtccaaatctcgaccagagcgctgtcaaaatggacgctcgcgccatggccaacccgttgaccgtgacgaacgaaatcgctcgaatcaaagctgagattgatcagcccttccgccattgagtccacggccttgggcttgcctgtcgtgcccgaggtatgcagtatgtgagaagaagtccaagcactgcgaaagacgggatggaagctatccacagccatcagagggaccttgctatgatcgactagggtgtggcgaaaagttggcaatcggtgctggtgcgttgcattggtgaggaccagggccgatttcaggttctcgagcatgctggccagatgactgtcgggaagtttctcatcgagaggaacacaaactcgaccggcatatatgacggcaacttgacccaggacgtgattgagcccccgagggatgataatgcctaccggcgatgtatctcctggattgcccgcctgaatctggattgccagtgcgagggccttttgatgtaactcggcataggagagccgatccgtggaatcctggatggcggttaccgctccatttttgcggatttgttgctgcaagagaccagccagacccataccctccgggctagtcctgccaccacaatgttggataggaaagactggcgtggtatattcggatacgctacttccatgagccagagctccgggtcgaataatgtcaatgcttttatcgtacatggtgataagtgtagctgtgaaaaaggatgtggtatgaagtagagatatttgttataggtatgtcctatgaggatatggacaatagcagtatattgatagctcctgtaatgctccatcatgcctctcctatttatacttgctcagaccactacttctggaatgtcgtgctttatttttatacggaactgtaattcctagagacgtatgaggcttttacttcggactgacagagtgacatctgtcttatccaattgaagctccgacaagaaccggattttatatccctattgcattctatacgcccgggccaggacttcgcatacgcgggctatgctttggactgttgtgctacctacacactgctgatctccccaaaccccatctgcatctccaaatatgacgtcgtaattttgcctcttgtctatatcaataatcaataatggctgtctcttctcgaccctgtgatgcgtagagggtggcgcttcgagaccaccagcacggatcctcagggatgatagacaagctccaataagtccaagcctatcatgctgaagcatcaacgtggctgagcatcccggagataaccctgggagggtccgcagcagtagcagtgacatgagttcgatcccagagtcgcacgaatcccaggggcaagtattatccacgaagtatgatcctaatcaggccgacctgatgactagacctagatctcaatatctctgtacatgcagacttggacatgcctcctggcacagtacgcttagtggaagaagccggcatccaggttccggccggaggaggtcccgacgaagaaaatgagaaatgcctgcacagatcccatttaggaagggctgatggtaaaactccgagttcggagtggttgtaagtttgggggtcccctcgcgaaacttcgagctcgaaacaatcaatgactttccttggccgatcacttgcatatgatccgggagatcatggccccggacgtctctaggattgcgcgatctgacatcttcatccagtagaatcacagattgcgagattttgatattggcttcctcccgtatactcactgtatttcttccgatcccaagcggcgactgatcgtctccctgggcgagggctgcgggatttccaaggctgtagacccgtgggaacaagtacttttgtaaaatccatgaccaatcaagaatttttggtccttgagctgatgtcccctgagccattttttccctttcggaacattttgcctgtgttcagctgcattgcattatggtaatggggcacgcatgacagatcaatatgacatcaaatatagttgcttcaggctcggttcgataagcattgaaaccaatattaaaggacgattgattgctaagcggtttgtatgaaaggttgagatactttcttaggggtgctgggatctgagaccttgtagagggcacaggaaatttgacgtactgggctcagtctctcgtttggttttttgttgagtcaagtttgtgaccgcccttacccttgccctaatacctattttggtcaggtacaggtacatgtcaggtgatgtatacttgcatgaggctttcctgttaccaaggatcgggcgatgaagtatccgttcttcaattgctatccttgcggatggcagcaaaagctatcaatctttctctactgacattgagaggtgagatcagcccagcgcaactgtcccgtcgaaagctgaaggacttcagtccaagtcaatctaagctcagccaggcccactaaccccgcaatcccccggatttgggtgggaccgggccaaatcctccggactccacaacattccacttccatcggattatcataacacatatatgcacatggcaataatgaaagcagatataaggctatagatactatattcccatttagtatcatatctatgttgcattccaggggaacccgcctatagcaggatgatcatctcacccgaacagccccctatttgtctgtgtgtcacaatatacacagctgtgagtagttgagggtacacaggtacttacattgccctggtatacatgtatccgtagtacttttggtcaagccgtgatgccaaacctgaccaatcccatatagtcaaggccaatcaagaccgcttcgacacaacagggctaatgtggtggagagggctaatgcggccccattatgatcgactgggacttcccactatcaattgctagagtgttttcagtattcctatgtgtcgagtctcttcaatattcacagatatgtaattcgaggtagatatcatgaccatgacatccacttaaaccacagggagacaaatgtatcctgaaacatttgacgactccaaggttatgtgacgcatcgcgaccattggcttgccaccgtacagggatgtcctagatgtcacttttcactcagtcctaagtcctgattgactcccaaccccgcattcagtcagatgatgacagtgtatataatctctttcatgtcgctcgcactgcttgtgtactttctcttcttctcaagaaactctcctctccatcacacttacagcaacaacttgacctttccatcaacactctatcctacacactacatccaagatgtcggcagccatgggtcctattatgcagcagctgcaggctctccctgcccgctcgaggcagggtctgaataacctacgccagcgtatcttccagcagggtatgtccttaccccttgtcttccgaccgtctcattaaccttactcctgatattcggatactaacactgttcaaaggagagagacaacccagagaagccaacctcctgcgcacctccctcaatgttcaccgtcccgtttggatcactgctggcggcggtctgtacaccagcatggcagcggtctatctcacgatgcgatatctgaagcgtgttgctaggtagatggaccagtccagttatctgcctgttcgagtcacttatactcgactgcatgattctacaactcccacacatgttttccactactcttcacatacataccccttttattcctcacccccatgtatctattgacaaccaccgtgtctgctcattagatggggggattcttcaggtcccaggttgggctattctttcttttattcggtcggccgttggtatcctcgtcacaggatggcaagatagacctggcatttctgtttcaagggctactttaccctaaatcaatactattacgatgaacatattataagtaaactaggcctgcctagccccagccacggagcgatatgcgcctttgaattatgagtgtgtaaatcgagcgaaatccatatatttttctagcaaggtacacacatcgaaagtcgctatatgaatacccaaaagtaaacctccccctaaaatccgaggttctgtgccagtacaagtaagcaagtcaaagtatgtcgcaaaacccgagaagtgacagatccactcggctgaagaatccccagcttttgagatgctccacttcaccatcaaaggaaccaggagtgcgctcggcccatcgcttccaccatacacgaatgagacctcaggcagacactttgtaaatagcctactggcctatcatacctcctctcttactcagagcatcctcacttcgctgggatgagctcattgcggatgggtgcatgcgttattttttgcctaggggcttggcgaccccgcgtttgtgtgaattgggtgggttgacagggcaaaatgagtgtatgctcatattttcaggtagagcggatggctatctgcaagtataaatccatttttgggaaggttatgtgataaagagcttcgcgaaaggattgtctggagcgttgtgtttctggtcttcttgaacttgatgttgtttcttccgttggaaaaagggtgagacacgattggatcacttattctctaagtaaaattagtcatccgagcactgggtctcatcaaatggctcctaatcgttcctagtccacgtagatgtgtatcacttgcttgatctgctaagagaacatgaacatgtcattctctgactctaagtgctctggggagaagcagccatgatttgaatcaaatatgtttcttttcatatgtctcaaagatcaagcatgtatatacacccccgccggagtcccgccggaattgccaagctttctttcaacctctagtgggaaccttaaatgtcggactaatgtactgtcttcctttatccaaaatgcaaactcaacattatgcacacctccttaagagctatgcggtatgtcttcgcggaggttctgctcaaagcactcgtcccctgcagtcctgtcttcaggtacgttcttcccggtccggtgtcgaatgaatttaaaatgtctccgcgcaggtgtaccgaggcaatatgatggaatttacggcgtcttctatcatgtctatgctaacacaagcacatacgaccatagggtgtggaaaacagggcttcccgtccgctcagccgtacttaagccacacgccggtgagttagtagttgggtgggtgaccaccagcgaatcctcactgttgtatgtttttgtctttttgcttatcatctattgtaataatgggtagatgttggggttttactggattggctatgtatccattttggcaagtaaagttgcaggtggagggaaggttctttttgggtatacatcccagggatatcaggaaaaggaatcgatatgtgtaaattaaataattaaatgaaaatagaaaatagagggccttgagaaaataagattgaagggggttcctttcttatcagtctttccttgcaacggcagcggcaacaaccaatggggtggcctctagctggagcaactcgatcagctttctgtccatgtcatatctttcagagatcggtggcaatatatctttttgtgttgacgctgagttcggggagttagggtctgactgccgagaggatcccgaggatcggaaccacattccgggctcctccaattcggagattctagtggggatagccctaggctgcccgagaccgcggagttagggagaaatgctatactgtgcttccttgcgtcctatgacaagttggctcgagtttataaatgtagagaacgccaatgccgcagagtgacagattatggtaatgtatttgcaagtatgtgagaggtaggaaatccaattgttctgatgccattggtaacatagcaaaagagcacatcttcgtatgtaaatccgttcatgtaactaagtgaccttcatgattggtagctgagggtaaccgtacccgggaagaccaatcccccagtcgagcccctcggctttctaattgagagcattgaggatctctacaacagtacagcgatcacttactatctgtttaccagtgcggagatcatagtatcaatgtcgtcttctggggcaccaacagccaaaagacaaagggtgaatttggcctgtaggtcatgtcgacaaaggaagtcacgggtgagtattccgctaatcctacactcgctcaacttcttccgcatatattacattctacatgccaataaaaattgggatcaaatcatgaactaaccattttccccccgcaaagtgtagtggcgaccggccctgtatcttatgccaagagctaggtttcgagtgtgtttttcccgaaggtggtacaccaaacaacttgactgtcgggaaaaggtatctatctgtttgttgtattgttctttgcaaatttttttttatattcaatacattcccggtagtgtaaactccaaaagatcctaacaacgtctgcagctatatcttacagctcgaaacccgacttgaagtcatcgaaaagtccctccaacaattacaaaaaactcaaacacccagcatacaacctcctagagattgtcatatccccatgagcgacacgtgtgtgactgacaatttacaccctacacaaagactgcagtctgacgccgacacacttgaaccttccggtcagacttcggctgagtttggggatattgacaattcccaaaattcgatagatggaatgggcgcgatcaaattcacagatgaaaaagattgtgggttctttggtatgcgcctcgctacatcacaattcgagtgtgaaactgaaatcttcagggccttcgtctaatatctcttttttgcaatacatttcccaagcggtggcaacagtaaattctcagggcagatccatctttgctacatctccattagaacaaaggcgacggggcatagtgaatgtttctaagcctgtgttttgtcctgccggttctactgacttggaattaaccacctttattccaggacgagtggacatgtatgcattgccatcggaggaacgcacttgggatttgatccagcaatttttccagaaaacggggcagcttctgccattcatccacgaaagctcattctgtgagacatatcgtcagatgaagagagaaaattccaaaggagttcgcaggacctggctcggcttgctcaacatcatactcgctatctcaacgagtttgtcggcgaaggataatatcccggcggaaatccgcatacaacaatccgacatctactaccaaagggccaatagcctttgcgacagagaatctagacgcaatgcaagcctggagatgggtacgtggaaatcccaaaatcgcacgtttaacagccaacctggatgttctaacatttagtcataaagtgcaatacctgcttattctaggccagtatctccaaggaactcagaaatctgttcaagcatggacgacacatggtttggccatctctgttgcgtaccagctcgggttgcactcgccacatgcaaaccaaggattctcttctttggagtgtgagattcgcaaacgaacttggtttggttgtatacttcttgatcggtgagaaactactctatagtaatggtggatgtaaattaaccgcgagcttcttagttcccttagtatgacttttggacgtccttgcactattccggagtcatacgtcaaattgaaaatgccttctgctgacatgcagatactgacttcgaccatcgaggcgagaaattcctctcagttggacggtcttttcttcacagccgccatgtaggccacgtcaccctttctatcagtgttgtgtttactgatgttcgagaagacagttatacagcattatgttcagcgtcttggattcttgttatggccagaaccttgggtttgaggctcctttcaacgctgccgagtcaacctcgtgtctcctgaaatgccaacttcagttgaacagctggcgtcttcaattgctgccatcattaggattccaagtttgggacggtccgatggaagcggatgacgtggagaagatgggggaagactctatactgaaacaccgattcaacatcgttctctctatgcgctacaacaacctcaaaatactgcttcatcgtcgccgtctagaaagttttatggaaacctccccagctgctgaacctataacaagtcaggacatgaaactacttggccagatggatctcggcagtgttgaaagctgcatttagtccgccatatcgatcatttctacagtacatagaatcttgacctccaacgcctggcggcgcgagcttctgggcgcatggaactattccctctattacagtaagtcaccatcttgcctctgacttaggttgccctctttggcacaagtctcattctcacacggttttcatggggatttgtagcatttaatgcggcactggtcatttttgggtcacttattgtggctctcaaaaagcgcgaatatgatatgacaccatggaatgttgttggccattctcgaccttataccgatcgagcgattgatgcgctccgccgacttgattctggcaaccgcgttgtcggaagttgtgtggaatacctttcccatctttcgttggtccttagtgctctgggtaagttgaaactctgcatacctagctacgcactcactcttgccctgacaacctgacttatttttcttttttcttttttcttttttgattttacttctgttcagttggctacgtgttctgtttgcgttggagaatcataatgctgaccgattgcacctccatagaaatggacgattcggattccaacacctgctggaattcaaatttttctgctggattttcagccgatgttttcagctcgcaatatggagcgacgtcggcttccatggatttgggtgaatttatgacaggtcaggattgggggttcctcagtactctctttaaccagtcgcacaacgacactaccagtgcccctcaatagagaaattccatatgtatcagatttgtattatgtttattcctatgctggaagctgaattagccatggtagcaccccggaagtctatcctatatgcccctctggctcttcaccgaggcttttgcaactctctatagatcagatcattcaagtatgtacgtactactggccggtagcggtggcgaagtggtaagcaccccgaaggcaacatgcagaatgacgaattggtctaaggttctaatcccatgtgcgcggtgtgtgtatacccctggcgcttacttagcgagtacgtcgagctatacgggctagttgggcaggtgaccctcggggtcgtaatagttactgagggtcattatcgcttcgaaaacccattgagccagtcagaaagtttaaaggttccgagtaggtaactgaaaaattgccgcataaagattcggtggcattccaaatactttcaaaagtcctgagaaaaaccgtatccatcagcgggccgttcaaaagccgagagagacagcaagatcggttttcggattctgttccgacggggagatacggctggtctcatacgggagccaagaagctcaggtggatcagccactgtcaactttggcattaaccaacagaagttctataacacgataaaaaggcatctgattcgcaattcacaaggtctgtatcgacaattatcacgaagaaagctcgcatcatgtcgactctcagtccacctgccactaccatttcggatgctgttaccgtgtacgaccttattgtagttggctctggtttcgctgtaagcttgacaaataagcggatcgagacgacatggctaatgatgattctcgtgataatgttaggggtgtatgactgctctcaacttcctcgaagataccaagacccaaggaaaggcagcgaaactcgccttgatcgaggccggtaaagatggagaacgatgtggtgccagcaggtagaaccttccgagttctagtgataattgagacgtatgtgtgctgaccagattcattcagatggacaccggccttctttcggttggacaagagtgtgttgcaagataattgcaaattgaagtacaacttactaaagactgtgcagataacaggtttgatagcggcttcaaggatgagatgaaggtaagtggcaggccaatgacttttatattccttgcgactgactatagtctagctcgtcaggtaagcgttctagtcagcccgaagatcgcactttttaattgtggcagtaatggacttgccgatcaggcatactgcgagaaattggaagccgaagttcccactacagtgaagtttcttttggaccgtaaacagattcggaagctttcaatttactcggactgacactgacattataaggtagacggaatcatagtccaacatcaagatgagagaaatgtctacctcggatttaataccggtaagccctttgagaaatccaatttcaggctatgccaaatgctaatgaacttctagaccagaacttcgccaaaggagacgtacgcatcctaaaatgacttttataccagccaatatctaatcactacaaatagggtggcggatatgccataatcctcaagcttttcgagcacatactgtcgttccctcaggtggacattatgtgggagacaaatgcggaggaacttctgactcatggcgatggtaccattcgtggtgtcaaggttcgaaagaacgacggccgctttgacaatgtgtttggtgagcaagtcatgctatcatgtggtggcttcgagggtaatcgcgaaatgtgagtgtgatcaggacttattcgatatgatatgaatctaaaaagtatggaaggctgggccgatacgtcggacctagagctgaccaacttgggttggtagcccctggtctcaagtataatacggggtttgggctcaagatgggcttacaagtcggtgccgcaacggccggctctttccatggcctgcacgtaagttacgcaaatgaagatcttatgagattcactaacccgtcgcagtgtgaacttgttgatactcgctcctcaaagccagaggcaactgtctggggccatagcttcggtatcgtcgtcaacgagtatgctctaatcatttaaatgaaatgagggataaaggctcacattaccttctttagacactccaagcgattttacgatgaagggaatcgatcgtatgttcggcctccagcttgtactagtatcaaactgacaaatgcagcctcttcgctacttgcgaagttattgcttatgagacatggcgcggtaagtaatgaggtaggtcgaaggcgaacatgcaccgctaacgtgtatctcagaccaaaaccaaaaagcatatttgtgagtcagacaaacctatattataaacggtatatggctaaaacgcctccaagtgttaccgatgctcccattatggaccgattccgacctggttgggtttatgatacaactgatctggacccagagaaaggcgagacgatcgaagatctcgccaaaaaactcggtctcgttccccaagaactgaagaagacggtggatgaatataatgcttcgtaagtcagctagcaggaatgtcagagtctcacactaatggctggtggcagaattaatgacaaagaattcaaccctttggtttttgacggcaagagcaccttcggcctaactcctaacaagaccaactgggccgcaccgatcaaagtggctcctttctatgggtaatgctcccctcaaatcatataatctgcttagataccactgttactgatgggtatctaggtatcctctgactgcaaaggttgtattcacttttggaggactgaaggtcgatcttgagtcccgtgtgctctccacgacgggtaccccaattccaggtatgatttctaatatttccttatcacagcaaaatccatcagaccttcgcacaaacacgctaaacttacatcttgcgatcatttcctcactgacacgtcacgtcgtattaaggactttactgcgctggtgaacttagcgggttttattacaacgaggtaagcccaacctaatgatccgttattgaagcaaaataattctgacaaaccaacagagtaaggttgcctccgaaattggaatccgaagtcaatcgccaacgatgtgttctttctatgtactgactatgcaccttagatccaccatgcaacagtgcgctccgatgtcttacattcggtcgacttgcgggcaaaactgccgccaaggctttgtaagatcaggaaattctaaaatgacaactgcaccgcagttgcgagagcatattttagcaataagcaatgaaatcaactacttgaaattcacgaatgttcgcgcggcgccaagacattgcccagcctcgtgtgatgaaatatttttactaagctggatttcattgtgtaatgcaaagccaatcgagcatatggagcttcgtcgagccataagtgtagcgtatatctcccataatatcctggccttgtcttctatctaatgtgagtccgatttcagtcgatttttcacaaagagttgtatcaacgggcaatccatatattcactttcttcttccatctgatgaaaacttatactaatctgcctcaacatgacaattatgggcaattaaaaattgacgatacatgttatacagcctagccttcaagagctttttagtcaaatggatgcaagcccacgaaatactagggaggagatagaatgggccaaccaagacggtagggcccagcacgagaatcgaaaaattgtggatactcccaacagactgcaatgctctttacatctctttctcttactatcgatactacggtcctaccctcgtctaggctcgaaaggttgcaatctatatggattaagtatactgcaaccaaagacgtcgcttactgtttcggaatctcgaaagcaacttccagccgtgagagagccgataatgtatcaaaaacccaagctccatcaatgagtgtgactaaagtatagcaaaaggctttggtgactgtgggaaacacaagagggtatcttgtcatgtggcgatgcaataaaacgggcatttgcaattatccaaagcgcattggaagatttagtatatgaacgaagcatcttggcgtaatcaagacgtataaaactattttactcgtgagcaaacgacactgactttgtctgcttcgaattgaatagcactcaaatcagcagacatgcgtccgtatctgtagggtgtaaagtttagttggaacgcatagtttaggtggcaatgcatcttttagatccagtcaacaatagtaccatttcttttgatctatatacaagcttctcatgttcagcgtgttgattcccgtgttcaataaatacatagggtgatcggtgaactttcctgtcgtccattagacgatggggaattttcttaaatacaaaagtcagaattgaagacagtgaatatacaccgtaggcaggaggtgaacgaattaaacgtgcaaataaaagggcaaaccatgactcagaaggtaatgaaaagagcaatatcgagactcaaacttgtaatttttttcagcctcataaattcgcgtgatccaaagtagcaattgattgattgtgatcacgacgtcagtgtcgacttgctgatatcttttgacaagctctgacttgtcactcttttttccacccgctccatcgttcaaaattccccgcatcgaggtgaaacaaatctagcattcgccccacactctgattgaccagatcctcaaccgacgaaggtctaatgtagaatgctggcacaggtggaaagattatggcaccactccgtgatgcagacaacatatttcgcagatgaatgtcgctcaatggtgtttctctagtcacaaggaccaactttcgcctctctttcagcgtcacatctgcggtgcgtgaaatcaaatcatcgcagaacccggaacttatggctgcaagcgtcttcatactgcaaggcaagatgatcattccatctgtgtgaaatgacccactggatataggagctgccatatcactgatattgtagacgtgatcagcgagagccttgacgttggaaggatggtagtctgtttcgtatttgatggttgattcggcccatttggacattatcaggtgggtttcgacgtgaagatggcgaagggcaacgagtaaattgattcccagtattgttccggtagcgcctgtgattgccaccacgatcttcttgcgtggctcacctgcttggggctgactggcgggcattgttggaagagtcttaggtgagcaccccaagttcttaaagagcatggaacaatatcctgtgttggtgctggccgttatggaagcaatggccaagtgttcaaggggggccttttatttaaatatgccacccctctaccttcgttaatctatcgtagccataaaagtcatttatcttgcttaaaatcattgtggtggttgtctttggcttggcaattgctgcccgggtgtagatcggatcctttcgtaacgtatctcctgatggacaaatcgcattcgaggatcgaagctacggctagtggagatcttcggcctgccgggcctgtcggaggggagtgacaatcagaagcctacggatagatcggccggggagatacaagagggtcatagtgtggcatctactatgacgagaataggtaagatcagcatcccgcggctaccacattcctatctccccggtcatagtttacgctaacatccatacatactaaatcgcatgattgagacaactaatatatttaccaggacttgagcagacaaggacgaatccaacacgaatttaattgactcgacttcgtgagatcatctacctttgcatcaacttcaccgcgcaaaacatttgctcaagttatcgccctctctgttattcctgaaacccaagcatcgaaacatgtctacaagaaagctctctgccgcaacatccttgcgcacattccttgaagaatgtaaggccgagggagaccttgtggaaattgatctggaggtggatccccatctcgagtccggtgccatctctcgccgtgcatacgaaacaggtagcccaatgccccttatcaacaaccccaagggtaaagatggtccagatggtctcttccgtattctcggtgctccagtgggtgtccgaagcgatcccgaaactcgcaatgcccgtttggcgaagtctatcgggctgccttccaacgcaactggacatgatatcatccagaagctcctagccgccaaaagagccgacccaattccatctgttcaagtgaaagacgcaccactcaaggagcacaagatattcggcgataaaatcgaccttctcaagatgccggttccacaaaatcacgtacacgacggaggaagatatttcctcacatacggactacacagtgttcaaactccggatgggaaatgggtgaattgggctatcactcgctgcatggtgatcggcaaacggcaattgaccggccttgttgatgtgaatcaggacattggcgccatctgggcgatgtggaaggccctgggaaaggacacaccttgggcctgcgctcttggtgttccgcccgcagctgtaagctcttacctattctttttgatattctgtgccagcatcctacgctattttccagaacgctaatatctgaaaacccttcaggccgtggctagtggtatgccacttcccaagttcgtgaacgagccggattatgttggtactctcacaggagttcccgtggaggttattaagtgtgaaacaaatgatcttgtagtgccggcacagtctgagttggttcttgaaggagttatctcggcaaccgagaccgcgatggaaggccccatgggagagtatcacggtcttcttttcccacccaagaaatcgccacagccggtaatgacggtcaatgcaattacctaccgaaccaaccctatagtgccgatcagtgtcgcaggccgtgctccagacgaaacccataccgtttgggccctgtccatctgcgctgaaattctcgacttgttgcagcaggcaaacctaccaatcaccaaggcctggtgcccatacgagtcccaagccatctggtacgtcgtccaggtcgatcggaagaggcttgtagagatgaagaccgcgcctgagaaattctgccgccaaattggggagatcgttttctcctccaagcctggtagattcgtgccaaagatctttgttgttggcgacaatgtcgatcctagtaacttgcgtgacgtcgtgtgggctgaagcgaccaagtctcagccacaggccagtgacttctacttcgtgggcaactatccgacatatgatctagtgccatatgccactcacggcttcaacccccgtgggcaaaaagccaaggtcgtcaggctgtgcatgttgcctgaggagttcgagaccttggaccggccatgggttgaagcttccttccgtggatcttatcccgaagaggtcaagaacaaggtcctagaaaactggcaggcgtacgggtttgagagatctcctgtgaacttttaaaagtcttattgctagggcctttcaactgtgctatctggtctttacgttccttgacgccctaacctttgcttgggaattgaaacggacacacccaactttctcgaacgaagtagaagatggtgttttaccactcacagggttcttcgttggcaagggtgaaggggaatcttgatctgttctaatcattcaacattcacggccccgctgctaatgttctgattctcaatgcatcaactgccgaatcagctcgaaggagcccctttgttttgctactgtaccaaaatcatatagaaatacatacacaaatcaaatacctacttttcgattcactcaatggtttatcttgccgttcaaggttatacctacttctgagattcctaccacaaagaaaaacatggaagtggtgcaagactttgaaaaaaagtgatcgaaaggataccggcaaggttcaagtgaagatcaccagtacattcgagcctggcgggtgtgttcgtacgaatgtcatgggaagagccttctcggttactttcaactatcgatatgaagccgcttcttgctgtcatcagatcttcgctactcgacgtcagctgccaagttcccacgagagaaaatctcccatttcgggacaaaggctagaacaaacaatgaccttgcgatagttgctatcctactcgacccgaaatggccaacggtcatcattgaatcgggatggtctgaagcactgaatagatcgaaggaagatgtttgtcctggctaggcgaatcaggccagcaggtcaaaatcgcactgacgataatggttactccgggggagactgtcacaatcgagcgacgggcactcaataaaacttttgttaagccaatccaaatgatgcagattactcgagcgaagtccgttgcccgagatgccaattctcgtgttaaagaacctgcggtagaattgagggacattaaccagcgagtctccgaggccgaggccgagttcccaaggaggaacagcgagacagattgcatatatcatattccttcccttgagctactggtgtaacggaaatatgtaggttcccgttgatgctaggaagaaaacgtcagcttaacggcactagttagctaatgacagaccacttgctttttcatgatgataatatagctgctgctttcgacgatttgcaggtgcctcgatacgccctggggaagaaatcggcgaatcggaccattgggagccgttacatattggtacgaatcgaccgtctggaagcgaatagagaatatcaacttcattcattagtttccctgaccggataaggattaggataagggaggaccaatacctatacattacattacaccatacatctatacatctctacatatggagtacacaatacatccatgcgggccgtaccgaccaggcggaactctaatgtaggcacccgttggctctgaagtcatgggatattaaccagctgcacgttgcacgcctctatcacctcggctggctcaatatagccacaaaaggtggtcccggcgcaaaacaattggtctccgaaggacccgactcttcccgctctgtcgccgctggtcctggtcctcggtggccatctgcttccgcacaacccagacccagcctggattcggttggtatctgtgatattgatcaaatcatccatccgagatagatagtgctacttttagttaggacggtcataattctacccgcacctcgttgaatatgtattttcacactaactatgcatatttatgcccttaatgcattcaatatatcaatgtgctagttatttatatgcccggtgcgcatcccctagtgggtcaagtcggtcctcctgaccccattaggaatagttggccttgatgtcatggccccgcataaccccgcaacgttgaacttgcacccttccctaaattcaactgcaatggtttacggttgcagtcttcacctcattctagatcgtttgatgcgaaaggagtctaagctaatcgtatataaaatagaagtagagaggagaatcagccagagatgctaaatgtgacctgtcacagacgggaaggtctatggcactagtgaaatataagccagttattaagcttccttgagtgcccaggtggagacctgtctatttttaccttgtaaggctaaattaaattgacacgggcggggatataacggggattttctgtctgttagcgtttctcggcatccttggctgagaagcttaacacattctcaatataccgtgtcgatttgtctcgtactcgtgatattccctcccgcttgtgcaacatatttgatttttgtgacgtatacgcacaccaccttggcaaaccgagcagcctggattctacatgcactgctaagaacccgtctttactcacacatagcgggccgaggattggcctaaataagcctgcgacgccccggggccggcgagacttttgtactggccaggacaatccacaacttttagtctcaagccttctgcaactgcacttattgcttgtcggtaaatcccgcttccggcttcgttactgcgacctgcagcaagcgacgatccagggacttctgctattcctggctatttttaaattcccgaggggatgaattacctccaaaacctactgcagtgaggggtgattctacactaaagtctccctatccctgatctatcgcgctctccgtgcccgtcccgtctccccgcctatgacggtccatatcccctcatagagaataatgtctcataacaggttctgcagagccgatattccgatgccttgcctcgtttagcgtcgccatgaggggaacccctcagcgaatatttggagaaacgcccgcacctgattagagcgaagggatggtgcaatacggaagcctctgattcataatgttaaacttttgttggccaatctcaagcgtagacatataaaaggcggttgggacgtgatagtagcccgcttttaatttcggttcaacctacttccttctcagttctccccgagtttcttcgaaacgtcaatatgaagttccaactcttcgttactctgcttcctgcagtgttacccttggtgcatggtatccctgctcgcagggatacccccaacccgggtttgcgaggaagcgatttgctggttggatattcgtcatcgaataagggtggcagcgactcgccacctgacatcaagtatactcttgttcctggacagacggaagatcccaatattgggccgtacctcgatttcgagaaagccgataatccacagccgatccgtggttccgcgggggctgatgatcccggtccgagtatgcaatgctattctgattggatgtataatacagagtacactgacattcttttagggaactattactatgacagaatcaatagtgataagcttgcaccgcccggaactgaccatggacagacgattaatgcgcagtggccaatgggtaagtctggtttgtgcagagaaatgtacaatttgctaactgtatgctaggattgagccacaacaggtaatcttcatccccgaacaagaacaccgcagatactcatattttcttaaggcttggatcagatggagctggttgggctcgccaagagaacataaatgtgatgccggatgcgacgctcatggccggtgtcgatatgcgcttggcgcctgccggttaccgtgaacttcactggcatgtggccgctgaatggtcgttggtgttgaatggatcgtgtcgaatccaggtattggctcatctcgaagggattaaataagtactaaccagccaggctgtgaacgagaatggggagacatttatcgacgaccttactgctggcgatgtgtggttcttcccaccgtgagtattgtaatgtgcacggataatgctttatactaattatttatgagtggtgttcctcattctattcaagccctagacgatggagtcgagttccttctggtattcgacgacggtggcttcaacgaggataatacattcctcgcaacagaagtcttcctccacaccccggtaaagaaaagcagatcttacaccaaagaaatccaattgctaacccatacacagagagaggtcctctcaaagaacttcggagttgacgtatcagcctttgacaagctccccgccgacgaattatacatattcaaaggcacgcccgccccagcagacatcgagaaacagaacgtgacaacaacagctggcatcatacctcgcgcccagagctactcataccatttctccgagcagcccgctcacgaagttgccgggggctcagtgaagatcgtcgacccgctcaccttcccaatcgccagtaacttctccgccgccgttgtcaccgtccatccaggcggcatgcgcgaaatccactggcatccgactagcgacgaatggacgtttttcatttcgggccagggccgcgcgacgcttttcacggccccgaatgctgcgactacattcgattatgccggtggtgatgttgggtacttcccaaagtctaatagtcattatattgagaatactggtgacgaagacttggtttttgtggaggtgcttcaggcacctcagtttacaggtatttttcccttgatatatgtttggggtttgtgtactaacaatagtagatatggctcttggtcagtggatcgcgtctacgccgagacaaatcgttgcggatactctcaacctcagtgaggatgtgcttagcagcattaagactgagaagcaatatgttgtcgctggtcctagcagttagatcgctcacaagtgggctgtttataatccacaatattgataattttcttggtaacttagcaaacctttactagagatgctttatagtagaccatcaattctctgcagtaatgcccaaggctttcgtacccttggataagcagcgagatgagctatcacaatccacatattcttcgtcgttgaacataccactagcagaaagcggaccagcgcgtcatggtaaataacagaaagaaatgcctataacccatcgagacaagctccttcttctccgccttatgttaaggcctgtaaggtgggggtagatcaaggccatcatccggactatccccactggtatgtgggtcattatggtagccaggaggaacagcctctcgatcgtgactcttgggatccaatcccggaatagtagacccaagcacagatgcagattgctaagaatggtcagttgatgcagctccttgctcgatggaattaacttaccccggcccctgagtctgacccatgatttctaataacaataggatcatgatccccagtcttcccaaccaattcattccgcttccaaataccatatttaagaaccagtccctgaaagtccgaccgctcgatgacgcactcagcgacaacgcagtttgtcaaggtagctctctcgatttgactgcgcgagaccgtcgtgccggttactacactccgcttcaccgcgctctggtcttgaatgaccgactgtccgactgtggatcggtgcaccgagctctgactttgtagagtgctgtttatgatatcgctgcgctcgaccgaggccgcgtcgtggaactgcgatttttgacccgtgctccggctcacgtcttctgtcttcgatagtacacagtcacttaaggtggatcggttcacgcaggaattggtgatcgtgcagttgttgataatgcatcgagttatggtgttgccgtccccgctcggtgcgctggcttgggctttatcgctgtccatgatagcgctcgggatggaagtatttgacaaatgaacgagatatgagtaattctctggatgtgtatgtttcccagagcaatctatttcgtcaagaaatgttttggggaaatgtggaaaatttgcgaggatgacatcgggtccgaggctcaacaaagaaagctgttgcctacaattttccagtttgtaacttatatcggatatcctatgttttatatagagtgtcatctaccaggaggactacattagcggaaaatatatataccaacatgattaaaacattgactacgcccttcagtggcaacaattgatttctgatgtccacaaggtccccatgtatatattatgtttatgtaccctttgaagatatctgattctgagaattgtttagtatgcatagacccagcatccgcatggccaattatcgttctcaggcatggtagttggaccgtgatgggagacaatagaaaactccacccccaattcccgcaacgtttcaataccatcctcccagtcctccgtgctctctttctggccctcgccatagaacctcctgtatataaccgtccgcagatttggaagctccccggcctccacccgttcaccaatgctatcgaagaaggtaccttttcggtcgaattcattcaatatgagagtctccagactggcaggaagacactcatcaagatcggatgcaccaaattcgtcacatgggtttctttcgtggtacgcatacgtctctatggggattgtgagctgtttcaaacagtacaagcggtcgaaagccggcttgttttctgtatccatcatgtcgaaatcaagatactccacatcagatgagtcgctccgttgtattgctgcaatgtactcggatcgaaagccctctctctcgaatgccccgctcggctgcgaccatccgcctctcatggtgatgtgggtaaggcccgtagggaaggcgaggatctgtccaaatgtagatggttcaatctgacagctaaccaacgccagatctttgagagctgtcttcttaggaggaaataatttcccaaagcttcctgggcgcaaggagtctattatggcgccttggatgtggagcttctcaagttgttccatgtagaaaacaatctcgttttgactaaggtcccacccatctgaccaagaagtactcttgtaggccccgagatatactaaagaaaattagccttttgctcactccatcgagtcagattcaatgatttacacgaccgtagcccctgtcccacgtatcgactggggggctcaatctcagcattatctttgttttgcatcaggaaaacgagtagcgtgcggttgattttggacggcacgctgcgcaaggtcaggctttcaaggttttgcatttcagtgacggcatcaatgagaggataatagatttgatcgatctgggcatcatgaaagtgttcctggaagtccaagacaagagaagataaccaagagctttgctccaatgtcctcgcaagctgctcacagttgatcggattcatcaaacagatcgaagtgtagagtaatggcgttgtgagaacctggaatttgcgacaagtcaacgtaagactgtaaagagaagatggtgatcgttgaaggtgctgaaatatcatctccagcagttcaacaggaagatttagtaaaatggagtctgggacagtcatggtcggtagattgtgacaagagagaaaagatgcggaagaagtattgattgtctatcaatgagcagaagctacctagtgaagagggaacactgcaacgaaggcagcaggggtatcgacagcgaagactgggtaaaagcagagtcgttcactgaggagaacaccgggatgactaggtactggtggggtattttatatccatggaggatcacatggccacttagtcatcctgctctggaatctgggggacactacattattgagtagtcagaaatcagaccaggaactggttaacatgagtgaaataacagagtatctgaagaaacaagcggatatcttatgccgagctcactgactcccctaaagcggccgacttgcaccgacggctagcacagctatggccatcgaagtcctataccccgatattcttgtactccaactagatgcgtaagtaaatacccagctttggtcgacatagaaaagtctacaaatctcacaggtatcattgaagagtaaaagttgctattatgtaaatataagttgaaagggacttcatcccggaaaagaatgtacatctttagtggtttagcaaacgtatcaggtctgctgtaaagccataatatatacctgaactgttccaacagactggacctattccttcagatccgcacatccgagggcgagggtgccaccctaaaaccagttagttatggactctccgcggatgagtctgcgatgtagagtatcacttaccaggaggttagcctcggtgcagcactggggcttggtatcacagctggatgcctcgtacccgtggcctgtgagaaatgttagaagatatcccaataccatctggtaaacataacaagatagtccaaacatacagagaagaccaatggatccaacgatgttggcagcatcaatgccaagagtcaacaagagggggtcgacaagggggtcgagaggagtggtgagagttccacagcagaggaggggaccgacacattcagaagtatcagagcgcttcacggagaggctggactcctgagggagggcggacaccatgccggcgccagcgagagaaaggacggagaagatagagagtctcattttaacggaggtttcaagttggttgttagaagaagagaggagtagttgtgatgaagaaaggattgcgattgtggatgatgtctggaatccgtggaatatcctggtccttatatagttttcgagacaggatatctaggtatcaattgcttccaagaccacccctatgttcaataattgagtaccctgatgatctaggtcagattgtggaaactcgatttgtgagtcgtaaaaatgaacccccgagtagttcctttctcaatggatcagaagatctgcaaaactctagatagcattggtcccagtgtaagaggtcatgtgagaggtcttgaccacgaaccgaggcagagaggtgctggaagggcagtccctggtactggaagagtgaactagttccttagattgaatcacatagttcatgatgtggatatccatgatccagatgggttgtaagcgagctgtcttggctgtcgatcactcttgctccatgctcactgcggagtaactccgtatcatggaaaggcttgtagtcactggctgcaaatgccaaatcaatatacaaaaccaatagccagcggggcaaaccccggttgtttcctctcccatttctccggggatttccttatcagtggagccggttccaggatcttccctggcaccgaatcagaactgccaagacgtcgatccatcacagggaactcgcagagcccattctctccgatcgacctatcaaccggaactcaattgatgaacaggaaccaaatctctgatccgtagtgctgcagtctccgcaatctgaaattttatgcagttggcttgcgatttgtcatttccaaccccggaaaaaacgagatatttgagataagtctcgcaccgttgattgcacggcaacgaactagttttcgagcaccaaggggttaacattgtgttgatccaaatgtcttggactcttggtaaaccgatctgggcaaagttaatccggatgaccattgttcttcattggatcacttgaagtttcgtacatctcggcttcccctgattgtcgtcatggtccgtgacgatcttgataagtatgtctgaatgagttacgtgaacgattggatccaacattagaagcagatatcgatgctgtgccttgtttagtctgtcaactaagagccgtggtcatcatctcaaacatagtctcaaatcatatcatcttggctttcaggggattcggtatttgtcattatcaattcgaccatctgccgaaaaacaggaaaagactgggcattctcgtggcgggatctggtgagatcctgggtcaggacttaacgggtcattgttggccatgggcagagttcgcatgggcctgcaacatttcgtggaaatttcttgaaattcagataggattccggtcataacgatgaagaacgaagtgaccagggctggtaaagaaacatgtggcggtgtccatgtggcggtgcttgttcacaccgccacaccctcgcgacacaaaaaacctccccccctcnnnnnnnnnnnnnnnnnnnnnnnnnnnnnnnnnnnnnnnnnnnnnnnnnnnnnnnnnnnnnnnnnnnnnnnnnnnnnnnnnnnnnnnnnnnnnnnnnnnnnnnnnnnnnnnnnnnnnnnnnnnnnnnnnnnnnnnnnnnnnnnnnnnnnnnnnnnnnnnnnnnnnnnnnnnnnnnnnnnnnnnnnnnnnnnnnnnnnnnnnnnnnnnnnnnnnnnnnnnnnnnnnnggtgccgtgggggcggtgtttttcccccccgccacaccctcgcgacacaaaaaacttcccgccttcaattaatccacaccacattccccggggttatcgatcaatcaacccctctacctttttgatttttgagcagttgcccagcgcatattgcccatagatcacaataaaaatgccttcaacatctctcgccgacctggtggccgccctccccttggaggacacctggggcccctccacctccgccgataacatgctttccggtgtgccatatgctcctttctccaagggcgacaagctgggccgcatggccgactggaccgccgagaccaaggagcgtcagaaccaacgtccccagtacaaccgcggtttcagaggtatgttcaccttttttctgtccccaccaagtttctctttcagtcgaatagcaatggctaacagtcccattagaccagcaggtgtacggtgccggtacctccaacctcttcactgtcgcagccgccgaggacgagtcctctttctccgtcgttgacaacactcgcgtccagaagcgcggtttcggccgtggcggtggcaccgttttccgtggccgtggtggtcagcgcggcgctgctaaccagcgcggtggacgtggtggattccagcgtgctggtcccaatgttggccgcggtcagcaaagtggctaccaattcagcgaccgtggcggcgcccgcggtggccgtggtggccgtcgtttcggctggagagactacgacaagccccagcgcattcgtgaggcatctgtcaacattcgtcctgactggaagatgctcgaggaggttgacttcacccgtctgtctaaactgaacctcgatgctcctgagggcgaggacctcgagacctacggtttcctccactactacgacaagtcctacgacaagccccccgtcaagaacgccgagcgcagaatgcaagccctcgaccgtgctgcctacaacgttaccacctcccaggatcccgtcatcaacgagctcgccgagaagaacgccgctaccgtcttctctacctccgatatcctgtccatgctgatgtgcgccacccgcagtgtctactcgtgggatattgtcattgtccaccagggcgacaagatctacttcgacaagcgcgacggtgcctccttcgacatggtcagcgtgaacgagaatgccatcgatgcgcctctcgaggccgccgaggccgccggcaagcaggagcagattaacacccccaacgccctcgccatggaggccaccatcatcaaccacaacttcgccctgcagactctgatcgagtccgacaagaacaaggtttccttcgccaagcccaaccccttctacgatgagaccgaggaaaccgagcccctcgcctccaagggttacaagtaccgccgcttcgacatctccctcgagcgggatgaggagcccgtctccatggtcgtccgcacagaggtcgacgccgtcatgaagggcggccccaccggtactgaggaccagcagctcatcatcaaggccctgaacgagttcgaccccaaggcccaaggctccggcggtgccctcgactggcgcagcaagctcaactcccagcgtggtgccgtcctcgctaccgagatgaagaacaacagcgccaagctcgcccgctggaccacccaggctatcctggccaaggctgacggcatgaagctcggtttcgtgtcccgtgtcaacccccgctctgctgctgctcacgtcgtgctcggcgttgctggctacaagccccgcgagttcgctagccagatgaaccttaacctcggtaacggttggggtatcgtccgtactatcgttgaccgtatccgtgctcttgactccgacgagcccgccgataaggtcaagaagtacgtcctcatcaaggaccctaacaagtctgtcctgcgtctgtacagcgtccctgctactactttcgaggaggatgatgaggagcttgaggaggagaaggagggcgacaagtctgatgaggctgatgagtagattttgttctgatgaattatgttcttccttaaatgtgcatactcgacctaaaatttgatgcttttatactctgactatagagtctaaccacaatctattcaacaaacttcatttttccagacaaacttgacttttattatctcaataactaaaccattatctgtgcaaggagaagataccgtttggttggcacgtccccggatcaagaagcctgttacgcggatgattcattttagtaatgcttcctttatgtgttgcccgtgatgtccatagtcgagtaacacgacttttgtacaactttctcgggggaacacaaggaacgtcttgggtgcctcctggtgacttttggcggttctacgcgccgaggattttctgacgtgggtttacgggtataatgctctttttggatatggatacgcttatcgagaaggtgttgtctgctgatatttgagtatcatataaacttagtgtcattagagtagagtagagtgatgtattggaagcaaaattcaaagcaatataatccattgctctacctgataggaagaaaggcaggatatttccgatttatatatcatctgtaccgatgatctcacctatatacaaccctcccagcgggagtgtcgaagacaaagaataagagaaagaactaaatatagtaagagtcaaaataaaatagttcacaagcacaatcaaaccgaaaggcaggcaacaagcaaagacgccgagtcactccgtggcggtagccaacacaaacaaaaagacagattctccagacatcagatcataataattttcattgcgtccgaccgctcaaccatacatcgaatcatcgggcgcagacatgctgagatcgaccttggtgccgagcacgctgctcagacaatctatcaactcgaagtcctcgaccacagcaccgaagccgtagcagcggaccttagtgttgagcgtgtcgataatgatcttgatatcgtcgcgccgcagtgtcgggtacagatcgtggttcttgagacactgcagcgccatgatgggcgtgatctgtccttctgtcacgagctgtcggctgaggttgaggagtgtgctgaggtttgcatgcggtaggtccggcgccttgtgcgggtatggttgttcgggtgtcgttttcgcaatgtagctcggcggtgggcacgttgccatcagggcgtgtccggaaaacggcatgtcttcgtcgtcggcttctgtgaccgaccgccggcagaggtagtctgtgtgttcgcgacagggaccttcgagtctataggatgtattcgttagctcgtgtttgttattggatgagaatgggcctcacgttaggataaagtcaacctgcaactgggggtcggtttcgaagacacctccccgcgtaactggcatgggctgcatagtatcgacgggtgcgcacgatgaatgatccatgctcatggaatgcccgcctacactcgtgtggtacacttgctgttggggcgcatatccgattgggggcgagatcgaggagtgatccatgccattggcgcgggggctcaagtcggatgagatcgtggttgcaggggttgtgttggggttgctggtcgagttggcgagaggggcaatctgcgacgcattgctgctgccagccacagtaacaggggattggaaggacatcatcggtgggcgctccgcccggcggcgctctagatccgcttcgtattggattccgctcgctgcgagaatttccttcaggatttcgttctcctctcgtatcgaatgcatcatctctttatgttgttgaattgatgcgttggcctctgcgatctctgtggtgtaggcctctcgtaaccgcgatacttcggtctccagcgctcttatgtattgttcctttcgctcgcgatgtgtcctgtatagatcagtccagcccgatgttctcgaatccgcaggatttgtacctctgggcctgacgatttaattcctgccgcctggtgagtgcaggcttactatccggcttggggccgcgacgtttgggctgctggccatctgcaaaggcttagtcgtggtccgaccgactggctgggatcactcacctcgcgtggtcttcttcggcccggtaccacttgtggcgctgccactgccgcctcctccgaagatcttaaatatttcggcaccgaagcctttgttcgatggggtctgcggttcttctaccatgtcctgcaccgtgcactccggggccgtgggccgagccggaggagcatgggcgccataatatcagcaactaccgtgggaatgccataaacagtggatatttgcttccggtccggaaaagctcagggtggtcggggagggtcagctctggatagcttaggtggcgagaaccggggaaacccgctgcaattcctcgaccccagccttcaccagctttaccaggtttaccagtttgcagactgcttgcagactgcggagggaccagcgaaatcaattggacccgtgcattccagcttatgtggcgatttgtacgttgtagaggtgctggataccccccgatcgcgaaccaccgccagcagaccaaaaggaaatgtagcactcaccaggatagcccattgcatgatccatagggtaaaccccaccactgacagccattataagagttttcgcggggaagggagaggcaagggagaaggttaagtgtgaaaatgagtcgagaaggtatgaagtcccgtgtctggagtctggagagtataatataaggaaaagaaagtggacggccgatttttgtacaactccttttttattttactttatttaattgtttgataattccttttctcttacgtttcttattaacggattttacgcaaattaaaatcaaaaaaaaaggcgttcgatctgtcttagggcccactgcgctataatcaaacggccgtgggacccgactcttttcgttgacagatctagaactggcagagattggctgaacggggtctaacgtcgtatcagttgacaggaatcgacaggaaaagatacgacagacacgacagaggcaaaatactcgacactttacacactcgatgcgttactagagtcatgagaagaaatgatacatagtcggtacgtccttatacgtgtgttatagcactacataccaagtacttatgaagtaccaggtacgtgcgaagtcagtgtgatcagtcaactgggctgaccaatcatccggccaataggcttggagacctccaggcacatccaatagtctcccatgctgagattatcgagattatcgagatcgcgaacattcccagcactgacaaataatacgatccctgggcatctgccctattcccactagtgcacatcgaatacaataatgcgcgcattagaaacggaataatgatccagctcccggactcgcagattctagtgcacatcgccgccgcaagcaccgcacaagatgacgcgcgctatagggcgcaagtcgccgccatcctagaattccagtgtgctacgcgccaaccgctgatgcagatgagcaagtctttttccaatgatagagacagcgcgcatccattctccgctggtgccgccgtgcattcttcagtgcccccgacgactcaacacgaggcctcgccaatattgcgggaggcgttccggcccgcagacacgaccttaccctcggatcaacgcttgattcctgagacggatggcgcggctccacgtaacatcatctcaaatcaattaagctccttagagagtcttatcagcgtcattccagactcccaacccgagatcgccgacgagctagtccacgccgagcaatctcgtgcagaactatcgcctcaaccgcagcgtgctccaccccccaaaagacgtcgcatagccccggcctcccctgatccggctcaaccggttttaatttcagactctcctgcaacggaccagcccgctgcacatcacagagtgatctccatccagaaccaggtcccaatatccagcctaggttcagttgagggcccttccacaccctcgcatcacatgtcgaccaacactacaacccctaatcccataaatctatccactctccccctcgaaatccaccctccaagacccccaatctccactgcctcgttcactacccacataaccccaaccctatccatgctcacagagcgcctaaacccagcacgcatctacaaaccatccactcaaacccgcccccttgaccccttagaacggggctactggctcgtgcagctcgccatcgaggatcaaacccacgaacgagaccgagaccgagatccagccgatcttcctctagtgccatccccaaaccccaagcatggaaccactaatccaaatgcaaatgcaatgttaaactcaaacccaaaagaaaacaaacgatcctggccctccccgctcttccacgccttctggtccttcctctcggacttcgtaggcagggacggccgtgcgggttggggcgtctggtgtattcttgaggctgcgacgcccccgtcaacgcgctcgtctaacacgcacgtctcgcttaaagtctatgcgtggggcgaggtcgctatgcacgtctacctgttgctcttcttggcaagtgagcgacgggttcgagggatgggtgttcagtggcgggatgcacgagaggaggttgttattcagatgccttaggatatggtccttgggtagtttgtttggtttggggatgggaaggcatgttgatatttggttgaaattgtgaaattataaattatacccccatagctttgcattgcgataatatcatttgaaattttgaatcttcaatttcatattttgatagaagaagggttattgtacatgctgaaaagaagaagaaaaagaaattccgtcgaggatgatagtaaacaacaaggagatagaagtgaaagccatgttttcgcgaggagagatcaatggaaatgattgaattcaataaatgagcaagtcggagtcagcgagtctccgacggtccctccgatgcgccaggtcgccaattggaggaaagaaaaaaataatgacgaaaagtgtgatcaaatcagtgcatggaactagtactgcagttcgccgctgccagaggcatcgactgcatccagatcctcgtagctcttcaggctgcggccttggacggcttcgcgcggggccatgggacctccgctggaacccattgagtctgggaacgggttggcagcggccatgttggctgcggggtggccagctggaacgctgacaccaggaggcggtaggcgaccaccatacatgcctggcatgccgcggggagggctcagtcggccgtttccattgaatcggcgacggtcgtacgggccgggtcggttgttgcggttctggccgcggcgcatgggtccgggctggtgaagaccaccgtcgtgtcccattgcatttccattccagccggaacccatcatgccgggaattggagggaaggtaggcatgtttccattgggggcgtagggcatgctggcaagggtgaatccacggggagtgccggtatgaccttggccggagccaagtgggaagtgaccgttactgttggcatcggatcgggatggggcaatgcgtgctgggtctaagacataggaattcactaaggcgagctatgatgactgttaatactgggaataatcgttggatgatcgcacacttacatcgttcttgatgccattgaaccactctgtatggcgcttctcgacatgcttgcgccagaaggcctcggccttaaaaagcttggtacattcaggcgccttgcaccggtacttggagtcgtcctcctgcttcatatatttcagaagttcatcctcaagcgcctgatcgacgggcttgccgccgagcttgctgagatcgacgttctctggctccaggatctgcagtaacttgtcttcgaacgtcttcacccagttaaaggcacgttgcagttgctgttcagatttggaaccatggcgctgtccacgcttctcctggacaggcgaggagggatcttctccttcctcactaggttccttcttcttggccgggaatggctggccgagcgcgctggctcgggccacttccttggcctgggtggaaagtccggtgcgcggacggcgaaggtgtccaccggggcacttgcggccgagttcatggactgagtcactttcaaagacacagaaaaagcagaagttgtagacccgacgtaggtattcaacaaccaagtctagcttcttcttcttcactgcaagttcctcatcatccacatcttcttcttcggaaatttccttctcttcaccttcctcaatctccccttcgtccccttcatcgccatatccgtttctctgcttcttgacactgactggtcccgtagcagggggctggagctctcctttgccgcgcaggtcgtcaacatactcttcgatcttggtgaaaccatccacagagatgttcatttcggagtccagtttggaagttaaacgtttggccagctcgagatcacgatcaattcgctcaggtgcggagaacagatcccagagagccttcttgcgcggctgagcaggggggacatgaaccccgacatggcaaacaaagtcaccatggacggaatcatggatggtcttgtcattgacagcctcgagagctttctcagccgggctgattgtgacaccaccgttcgcacctccatcttgatccatattttcgaactcttcatcgcgtccatcccctcgctccactgtggtgtttgcggaaggatgcaacatgatccatcccatgcgatggaattttttagatgggttcgggtcgctgaggctcagccccttgaaacctccatcttcctcgccgagatgctccttacaaaactcctcgatcttgctgcggctgacgttgggtgcgagggtttttataaggagcgcaggctgtgcaagagcttcgtcacgaaggtctccgccacggactggaagtaggtcaagcactcccatggtctcagcggtagccgtagtctcgccttcctccttttcaaccacaccaccggcaccgtcgctatcgctcttgtatatgccttcaagggtaaagtccttgaaaaggttattttcaatatcatgctcccattgttcatatgcaccttgtcgaaccgtcatgagacgggcgcgaagaggatctctgacttcaggaagatatcgttctttgaaccactcctcgttacggtgctgctggacgaacagcctggccagtcgaatttgcagatcaaccttgtatgtatcataagctgcctggatttgcgcacgttccttctcccgatcttcgcgcgcctcgcgctctcccttgactcgacgaccgccgtttttggcgcgctccttctcctcattcacagattcctccaatctccaccactcggcaaaccaattgaatccgacttggaaatccagtgtaagaggattgggcatcgggttggtcggaataggacgcttgccaccactactgctgtcttgtccgggcacatatcggtcgatgttggccacagttggcgacggggcacgtcggcggtcctcgcgctctcgggcagcatgctcccgagaattgttgtagaagtcctcgcggtgagaacgacgctccgaaggctcgtaccggtcaatcacgggcgagcgggagcgcggccgtgcacgtcgccgatcttgagaggctagtcaagagttaatttcgccctcctctctccaattctcaatgatagacttaccgggcgaccgacgtctgtatgattcccccgtggctcgtcccgtaaaagaatccgactcacgattcctcccgggagatccataaccatcgtaggagtccatcgttctcaacctaccggatagggatcttgtatcgccttcgttgcgatcaaggtatcgatagacccaaggactcagcccaggtggataaagaacaaacggaacagtttgccttgatcgataagggagtcgggaccgtagggtgagctaagatttggtatcgtcaacaacagaccaagcaacttcatagagcgaaatagcgatggtggcgactgggaagttcacgagggataacagaggcaggggtcagggaaaataaagagacaagaacacactgctgctggcgacatgtcaaccccggaacttggcaggggttggaacatgtttgcagcaggtggttttggatagcaaagagagattatgaagaaggctgttggccagagccaatgctgttatgcatataaggagtcatagcccacagaatccagcaatgcgcagctggcgccacggcttagaaaggaagaaaagaagatgaagcaggggaatggaaaatcagggtcagaggagcggaggctgatagaaagagaaagggcaagggacaaagccaaagaatgaacagaatccgattggagaaagaagagggccacctacaagaagcctcgagcgataacgtgacagttggtgataaagggaagaaaccgagaaggcggacgaagctggagcaagcttgggcgcttagccgaaaagggtatggcgtcacggggatcactgacatccgctgattggcgggtcctcaggaacaaggccagatgacaattgcctgccctaacttggcgacaagttgagtggaatttgcaagttaagaataaaacgagaagagggagggaaaggaaaattggttaagttggaaaaaaagtgagcccagattagccacgctaaggccgccacatatgaatgaagtacaactctagaacagtcaggaggccggcaacttgactgttgttagtaatttacttcatgggaatctgcttcagtggtgtaatacttgtctcactgaagggcctatcaacctgttcggttttctgagcccctgatcattcatgttggtcgccaggtcgccaggtcacctttcgcttgactacatgactagcgccgacaaacgaagtgatacatccatgcatagatcccggggctacggagtaattgaaatatggaacattcttttcggcttttgtgaatatgtatgtctataaattgtatacagggcgctgtatatatctaaaggatccaattgcaatgacaatataataaaaagaccaggtcttctcgttatagtcactacaaggctggtattatttataggaaggctaagtaactatagaacgaagcccagattacgcaatcttagaggaagattcttattagagcgccagagcaacaaagaaaaacagtttcacttggggtcaacttttcctcttcacatacctaccataaccacataaccctttcgatataaaccttttgacagagaaaatagtgcataggaagtttgggtgtcatacagtacccctgtcagttggacatgtattgttacttacgtagattacctagtatttccaaatgtgtattcacttgtatatattcaatactccgtacatgcaaccgcctacactctttgagtgattctctagctccaccgccgagataaaactagatcatattagaatggcaccggaatatcaatattcctgtaccagtctcgataccgtgatttacttctattaaaatacggtgtctcgtcgcgtaactatattggcgatcctagggaactagaattttccatggaaatgcaaacaaggcaaacaccagagcttgacagtgcctcgagcatctggcgacctatcactcgtgctcatgtctaagtgacggtatgagaggcttactcgacaccagaccctgcaaatagtgacttgcattaattgattaatgtatctgcagactactcatgaacctgcttatcatcatactcagcctgtcaaccacagtcctctcttcttgacgccttgtactgtatcttcatgagatgttcatcatttttctcagagtctgaagggacactggttttaccacataatcatcgatccctgccaattgcgcttgttgttgcatctcagcggaagcgactccggtgacggccatgatgcaagcttccgggatgttgttctccttttcatactctcgaatctttgtcgtggcggtgaggccatccattaccggcatggagagatctgacaaatcaggtcagaggatattttcaagactgaggtgagataaaccaacccatcagaacgtaatttatgcgttgcttggactctttgtatctgccaagcgcaatcaacccattcgtagctgattcgtagctgcagcctagtttttgaacaaaggtagtaaggatctgcaaaagagcctgttagcacacctaagggattggcagggactatgccactgtacctttaaattaatatcattgtcatctacaataagaacgtgcgctctgtcatcgatgatcggtggctccaaggtaacaggaagagttggcgcgggggtctgtgcagctgtgttagacattccagatttgggccgagtatttctgcgagcgtcatggtcgtttgattgcagagcctcctgcacaaacgccgtatcacatttgggataaggatcttgatgggtctcagatagctctaaatcagccaatattgagttgacagcctttcgtagtttttgggggccatatctattccaaattagcaaattagcaaggcatttgtgagaatgatcctagtacgcacggctgagagacgcgaacaagattcgccttgaaattgccctccgcaattgaaagcttctcacccagcaccaagaaagacttgaaccttgtttgaactgagaacaaagaaccgtcctgcagcgtctgcagtagttttgcttcctcgataactgcaaaatcgccttgggcgttttcgactgactctgaaaatgaaacactcaagttcggttgggctaacaacacctcgccgacggccttttgaatcgatagtttacgttttgactctgtgctttgaatgccagtgggtgtctcctgaaggtcgggatagccctcgaagccgattagacatactcgagtgggcggaattgggacggccggtttgctgtacgggtctaacgattcagaactctccgcggtcaaggattgaaccgggatgtagatatcgatttgtgtccccatacccatttcgctctccacgtcaatgtgaccgcccaggaaggtgacgagcttgtgcacaagactgaggcccaggccaatgccctctgataatgattcttcctgagaaaagggagagaacaccgagtgtcttaaatactccggtgatataccacggcccgtgtccgttactgataggtgagccagcacaggttcggaatcagaattagggctgatatttgacaaggacacttcgatgacgcccttccgggtccatttcatggaattgccaacaagactcatcaaaattctcctccaagcaccagctaccgtacgcactttccatggagtcttctcttcgatccgaatgacgacattgagattttccatgtccctggcatttgtagaggggattgcaggggtcaaaaggccctcaacgtttgactggaagctctgcctatccccggtagtctgcgatgaatacatgattccagtcacgtcctcaatgaggatgcccaggtccacatcggtcatcaatgtcgtcatatctgccatcaagctatcctccctttggatactattgatcttggtgaagtctagtctagaagtaatgatagatcagcaggagataatgcgtgaaactgaacaaaacttacagatggtccaaaacatctaacagcgttagaccgcacgattcgatcaacttgaccatatctacctggaccggctcaagggcagtcgctcgtagcagctcagtattaccaagaactccgtggagtggcgaacgaagctcatgactgatggaggagatgaaatcagatttcgacttctcgatggcatcccagttgacgcgggcaacttctgaaattattgaattcccgaatgccttgaaaaatccgagctcttccgaacctaaggcacgctggggtagtttcgtccaaactagggtcccggccagccagcgtgatttgttccaatcccataatggaagaaaaaggaccgagtctgcatctgggaactgtgccgctaaagtttgagtaatgtcattagaagcctccaactctgcgggctcgttatcctcaaattgatcgctcatattgaatatttgaccttcaggatatgcatcaatcattattctcaagagtttctccgtaacggcgactccggagtcatcaggtgacctatgttctgatattccaagtgcatgtccaaaactctcgcacaatgattccgatacttctgatgacctcccgttatgttgaaagggttttctattgatgaggcgccgtaatcgtcagatgtttcgttcacgaagcaaagggtggatggtaccaacactccagagttactttggtaagcatccaaaaacattaccccagcaaggtccatggaatccctgaggatagcactagcatgggagaagattgaagcaatgctttgagaaatggctactccgggctttatccgcgaagtgcggaaatgagaaccaactctatcacgcgtggtgtggttttcattcagtggagtcatcgccgctatttgtccttcgaagctggaaggaacggaggtgattcgtgtctgatcggacctttctgtggaaaatgacagtgctgatatctcttcggcgattgtcgttgactccagaactctggctgcctgcatcgaaggagacaagccgctctcaccgtcgttagccgactgagtatgaagaggtagacccgaaaatgtggcagttggtttcttcagctcagcatcggggtttggatggtcagtgacaaaatcagccactcctttgactaatttctctgctcggcggtgaaaatgcacaatccgggcgttttcaagatgatgggcaatagcatccgcaatttcttgcaataaagcaacctcgtgatccccgaatacgtcacgaggcttgtcgtccactacgcagtatgaaccgagcacatgccccgaggcgctgaacagaggtacttctgcataaaatcgcatatgaggccagtcaaccacgtaggggcgattcttgaaacactcttcggctgcaaaatttcggataatgtagcgggtgcggtccgcggttatgttgggcgtgttaagttccaacgaaatgtcctgggccgtgaataacttgattgtgtgagggcacaccccccattcaaggttcaaagtcctgaaccctagatatatgccattatttggtaaatgctgatctttatgtcgcaaggatatggacgctgtcgtttcggcgaggatgtgttgactttggccatcaataatggagatgaatgaccgatcgcacccgaatctatagacgcctagttgacctagagcattcagagtaatatcgggggagaggtatgcggtatcgggctgctcgtcatccaccggtgcagctggggtaggcgacggattgttcacatcgaaatttctgaaagtgcaatagtatctggagactatgtcagtaataagggtgctcaagactccttcggcagaaaattagatcgcatagaatgagatcaaagacgcacttggataattctcggatgcgatctcgctctgctcgagatggcaggggaagatctggcctgcgagcagccaacaaggccatatttcacttgatgcaagtggaaaagggctgagagaggaacgtataagtacgtacaagatgggagaggagttgagtcgagactggaaaagcatgatttcacaggtcgttattcttgattgccgacagactccacaaaggcaaggccgactattggccggctctggcagagcgacccgtatacttggatccggggcatcggttcttattacgattgctcctactcgagctggaatcacttggcatctgcgggcgcaacataatcctccgcaattatttcgaaaaattatgctgaggctccactagcaaaaaaaattagatatcattggctgcgcacggaacgcagaagagtgggaatgggggatcgccatgaggatggtacctcaaaatttcggtataagcagaaaccaccttttgtatcgccgtcagggggattcgaagaaatatagatagagtgcgtggcaagggaaagggggtggggggagacattcctaacgcctgaatgcatgcctcagcgtatatcgtgggtttttcaagcaggcgatcacacaaagcctcgagcatgactagagtgatactacaagggcgtccacatttaatacgttgtgctttaatgctgccaaacattcgtatattggaaaagattctcaggatgatactcttgtagcagtctgtgccatctgcgatatagatagttccccactgaggatcatatcatagataagttcatgctttgcagaggctaggttttggcgccatcttggttcggccactcgtgattgattgttaacatacggaacttcccactgtagtagggtatggagctgttgcaccaatttcgggacgtactatactcaatcacatgctacatcagtcttcttacgactcaagaagaacgagatataatgcggtaatgcataccatatgtataggtacatatatatcgccctcaatcttgacagatgacacaaattcaggcaagaagaagaaaaaacccgttatgacagctcaactcacgatgtccccacaggtcttttacaagcataaccttggaatatttgatactagtagggccatgctcaccgctgattggctgaccgagaccaccgcgatcgccaaatcgcaccagcataacacgccacattttgacctccgatcgaacgaccatgtccggtctcttcaactctcgctgggcacccgtggatgggggaaacaaaacatacccggcgagtcaaaatgcgccccggtactggtcctccaacaactctaatcccggcggtcatagcagcgtccgtccgacgactatcacatcccaagacggccgtttgctgccgccagccgaagaattggctcgatttatgaaaatcgtcgccaggctgcgatggaaacttccatttttagctgagggataccgccttgcgacactggaaataagcgatgtcgtatccgcagacgatgtcgcgcacgctgaaataatgttcaagatcgattttcatgaatattatgctctgcttgaacgtgctattgtccacttactggcggtattcaatatatcggttacatcctcgcctcggggaccaccagataatgggaacggcgtcggtcggcctgttggtattcatcgataccacgccaatgtgctagaagccttgcgggaacagtcaaccccactctccccagttcttggcggtggctctgtttatttgcaattgcaaaaggccaaggaactgcgtaataggtggaaaacagctgatctgaccttggaagaaagagaaaagcagggtgaaagaaaggacgtcatgacactcgcgagctttgacttcgaaggtatcatctctgatatttttggtggattagaagaatcatatgttcgggcaaaagagcatgtcgataagtgcatccgcccggaggagggcactggagagggagcaaacaccgaggcggactgggggttcatggtcgatgctatggattgggaagccgtatgagagttggccaactgcagattttatggcctgtgcttgatgtgtagccagtgtcaaatccatggttcgataaccaggtgcatgctctcattgctatgcacacccctgttagcactgcaaaatggctcgatcatggtcttgagtcacccaaatcctgttatcggtgtacctcaacaattgcactcgctagtgggcggttcgaaggttccccagctagaaactttgttggacatcgctgcagtccttggacattcttgctttcatttggcgaagaaaagacatgtcacacctttgttgatcactgcaaactgaatgatgtacatattagctgaaatgtgctatgaatcaatatgaacggagttgatattttggggctaaataagcatctcaacttgtcttgctcgtcgtccaacttttctccgatcaagacccgcagatgacttatgttatctagaatgagtagcccatgtaaaaaataagtaacggttggaaccatccctatcagtgagaactaaagagctaccgttcttagatgtgatgtgatgaaagttgaaaattctgtcatcacgactttctctgcgtggatttcaagaaatcttaattgatattttaactgcctcttatttttgaaaattgctcgaaaagcatgggcttataacctgttgagcactacgatgtgtgcccagacgagaagagagagataggtaattctgactaaggtaaggttgaattgggaggcaggagctagaacgtgcacgatttcactggccttcgcgttggtagtagaaatgcagaggtgaggtaggagttgggagtgtacctcgcaggtactgtccgatgtcgtgagcatgatggatatcttggaagataatcatgtccatgatcttaattaaaatgtagcccttaagtagcttatccctaagaaacttacggcgggtgcgccgggaattttgttcatgtaaccatttcggcaatttcctgccacagaagttcaggcttcttatcacgacctcgagacaatgctttcacttcaatgatggcaaacttctctgggaatgcccctgtctctagacagccgtctgtgagtataaccatgttgccaaaggatgctttgttgaatggcgagcgtaatggagaccaggcatagtgcatctcggagagatggatcatgaggaggcgtggtagagtttcgttgatgatttgctcttccagcgcgatgtccatataggcggcagctcagctgctacttcacttatcgtgatagcgatttccgactgaaggtcatttatttctgacggcagtctcaattggttaaagtagagcctgtgcgcgatccatcttcgaggagtagttggttctagctcgaaattcggtgggatcctgtgctgagactgcgcgacaagctggaaaacacccatattccgattagcatagtattttgtatgctcaccgatgtgcgcgtatactcacccacatattccaggaactaggcggcgccggcaccgatatctgtcttctttgcctcgtcgttcattccgtactccgtaatcaagacgagcgggtggatgggatggccttctcaccatttaattctaccgggccatgtctatatggcctttcgcttagacgttaataagttgtgcataggggccagcgatcccgtgcgcgttcaggaggaggagatggaagttccatagataggtactggctggacatgttgaagttcgtagttgcctcgtgcttgaggtcgagagccttgaccacctcttctcgggagagaattgagagagatatgggtgagtgagagatatatggcggtggtgcctacctcttgggtggaagctcgtgatatttgacagttgcgtgaggttgatggagtcctttgtgtaggcatgatcaagtctatctgtgcgtaacggaagacaatgtcgtacgtgtgtgcgtgtcctgctcatcgtgtttgaggtgtaagcggtgttgctggcttcaccaaagagaaagccgcggaatggttgcacctttgtcttcttcatcaattgcgtataagatgagaaagaagatcagaatagtgagatggcagccgtggaggacgagagtaaagatggtcatgcggacgagtagaccttagggattttagactggggagtctttgaatcaaaagtgccactagtatctaatagaggttatgtaagattcactgaactcacaggttaatgataaaaatatggtgaagtgagaatgaagtgagagtactatagatcagatctgtagaagacgagagtaaatatgactgacagactctgtagaggtaaaccattaactagaggcttttagactacagacttattattgatgtccattgctgttcgactatatctcataactaattaactatagctcttagcttcgtcaatgaaatggaaaggtagaaggaactctttcaaaacagactacgtgtacgttcatagcttgctatcaccatgatttctccttattgcgacagagaaacacgaatgttacaaaacagaaaccccaaggattaccgatacagacaaagacaagacaagacaataagtgtcaatatctgcaaatatattcatagttccaaatctacaatccaatttccacccctgcccacccttgccctgcaagttcctgccaaatcctaaccgaaccacgaaagaacccaaaggaaaaagaaaataaaacaaaacatcaacactatcagtcgagtgatattcataacaaaccagtctttcgaaaaccgatattccgatctgtttttccagtgatggagaccctctaaaattcccagccgaagacccataaacccgcaacacgagacaccggagaagaaaagaagcaaagtaggaaacggggatgtcataggaaaataaaatgaaaaaagtagccagaagaatattcataatagaaacacgaaagtggatatcagcatggggacggaaaggtggagatagcacattcgggtgaaggtcgaatatttagccaattgctaactgccgaatattatgaggcggcatatgcacaatcatgtactgcccttgaagaccatacatgtaatacaagggccagcgggcgacacaatttccagcagagtaaagcagagcatgctatctctccagtctcacatatcactctcaacaagtgaaagtgtagatgcttgaaacggtcattcttgtacaaggtatctcccacgaaggaagttaccgttgaggaagaggatcgatgataagataggcaagagggggaatgagaaagaaatgaatcgtcccggcatagcgaatataaacagacatcaggggcaaatgggggtaagatagattgaaaaaaaaacatcaagcgaaaacacatgagaagagagcatatcacaaagcacatcaaatggggcatagagcatagaaagggatccatacacatcgctcgctagagaaaaggtccaagacatccatccataaagccgtcacgacaaaagaaaaacaaaggaaattcaatacccgcaagtcccctcagcaagctgtatggttcagtcttgtgggtgaagacaatgaaaatgggggcgactagccgtcctcatctgagggctcagcagaatccccttcgcttccatcagcgctggcgttaaccttcgttttcttagaagaattcgagccttcgccgtgagcttcacttgacttgcgcttctgcccaccattctcggttggcaatggcttgctgagatcctcgaaggtgacaggctgacccgttacctcttctcgtttctccatagcggccacttcatctgcagtcaggaaacgtccaccgggtccacgcggtcttcgcatggcgtgattgtgtcgggactcgtgcagataaggcttacgaccctttgatgtcaaacgcagctgctcctccagcttttgtcgcgctacgcgacgcttcaagattctatggaactgcttggcgtttacgtacagtggcgactcttcttggttgccgccgggtaccatgtcgggtgagggctggctttgttgtacgggagcctggggaagtggggcggcgatgggggcccggccgacgtggctcataacgggctgcgcagtctggacattggggctaccgacatgactcatgcgacgttgggaaagttgctggttttgcatctgaacctgcgatcccatcgggggcatctggttttgcatctgggggggcgatcgagggtcacggtccttcatctgcatgctcgccatgcgcggcgaggctctggaaccctggggaatctggccggccatggaatcctggtggagggggtagaattgcccagacgcagctgcagtggccatcgcagcagcctgcgtcggcgagatgccgtaaccctgacccatgggcgtggggacaccatagctttggggaaaattcatttgttggtgaacacctccgggtccattctgtgcttgttggtaatgaggttgcgacggaacgataggagaggactgatggtttgagtgagattggatgggtgcctgggcgttggagggtgaggccatcgacccaacaggaggaccggcatttggtggcccggtttggtaaggaccagggatgtgagagggagcatgtggatgttgcccgtgggcctgttgatattggggagggtattccatactggcgagtgtgatagtggatcttgtcacacgccgattgagtggatcgatctgaaagtggcgactttatatggagagcaccaatcaaaccaaaggattgctttgtggtggtagctcaaaatatgtcaaaagttgatgacgacgtctgtttggtagatgtaataaaccgatatcgcaagagcgcgcaatgagggacaagagtcaacacaggtgctggggtagacggctgatgattcgacgaatagtctgcaggctcggggagtcgcgtcagcagagcgcatcgccgagaggtcactggattggcgggtgggggtatggatccaaaagaacacaacggaaccaagcacgtacctcaaaactgcccgcgcgttctgaacaacctatataatactgtgttttcgtaacagaagctctttggtcaacctcttgtcgagaataatcccgaactgcttgtggagggttttgactcttttgtgcaagattgttacgcccactgtcgggtgtaacgtggttgggctgtgatgcagcggtgccggggggtgcctcaactatatgtcggcttgatgcgttgtcaagtcagaacagccctggcgatgggcaggttggtgtggagactacgcagtatataccaagcacggtcggcaggctacctcattcacgcaactctgagactttctctgccacgtccagcgtagattcgggcggtgctaacagcctcgacctgcgacagataaggcttgggtgttggtgtcagaatgcgcctctcaggctccacgcacgaacactatgggctagaattagcattttaacatcctagccaatgatcgcgcaaagtcaatgaccaatgcgctgtcaatacagagttcaagtggaggggatttgggaatccggggcgggttagaccggtcagggctgagaggggagacatgtatgcgttggcaaggtggatgttgagctgcagctgggagcctacctggtcgatcgggttctgcagcgcagacaaagtgacgatttgagggtatagttaaaaactggccaaagccaaggaacgaatcactttgcgcgactatatgccatgtcagatgcaactgggtacccacgagggaagatgtaaatgatagggacgcgtgcagattggacaaaaagaaacatgaaacgcgatcgcgcgcataggtaaaatgagaggagccaatgagggaatagcaaggtagaattgcagtgttttggttaagcacgcgttgttttgacacgagataaccaaaagagcgcgcaacgtgggattggagcttagcgattaccttaataggcacgacagaaaggatagaaaggataatctccgggggttaaggtgactttccaatcccaggcaatcaagggatcccagggtagaagatgatttgaccagcggaggggagaggggggagatcgagggatcgtgccaacgagagagaaggcggtggttctgtgcgtaaccggagccactgatgtcaagccgggcagttccgcaagtatacaagtaccggcagtaaagcagtcaggcagcaaggcagtcaggcagtcaggcagtacaagcgcagcgttcaagcagtacaagatgtatatagggatacaattgtagttccaggtcaaatgggcaaaacaagtaaaatgggaatacaacagaaatccaagtgaattgtgacatgtgtttacccaaggcgaattgccagatgaaagatatcggattcaaacaaagaaaagcaatagcaataaagagagcaaaaagcatacaattgcagtactgttgtggtgtagtgattgcaagcagaattgtatacgacttaccccagtttgattggtatcaccaatagagaaggaatgaccgtatgcaaggcagggtttcaccaataatgatgtaaaaaggggggagatgatactgtgcgattggaggatgaactggagagggcgggcaaccaacgagaagaggcagagggaagaaaggcgaggaaaaagggcggatggggcagttttgtaggagattgactggctgccgactgagcgaccgccttgctccccgctgctgaggtagccttttctgcggtattacgctggattacgcataattaccggttattactggtgcattcctcctgtaaccgcctaaatggcccccaatggtatcagaatgaccatactgtaataaaacaaatccggtggtcccgagctctcgtcatgtgcaacccgagactatgacgcatgtatatgttgtcgttaactatcatctcttccttacaacatacaccataatctaatctttcgttcttaatcgacttttttagctcatataaccatctactgtatagcaatttactcaggctatcctttacatcttactctactaccctcgaaacccaatcctaaccatgaatcatacctttcggctgcatctgcatgtctgcccattcgcctcattttaataatcgcctcctttcttttttggccctttttcgtcagcttgcttcggctcatgataatcaattcgaatgcctaaaacgatgcgctcaatccttctttgctttttcctattcacggtggacaccgcgtacctcggccgtgtgccctattttgggcaagtctcctccacctaatgtcccattcctctatgacccttgcttcaaagcccgtgtacaatgtacaacatagtccgaaaaaagaagagctccacagaagaggggtttgtctagtacggtctacggagtactccgtattattcacggcacttatggttctgggagtgtgatgagatctcctaggaagcggcaatcagatcatctccccgggcggcaacattgcaatccaggcggaatgacggcattaattggcacacaagaccgtccgtctggcgcgaattggaaagatctagtttagtatcatgatgtagacgttcctgaaaacacgaggtctggctctctatctactcgcttggcgcattgagatgtttgttccagccgagctcatgacgcaattcaattaaccgggttcttatctacaatataggtatagagtacctgttatgcataatatacgagactgtttctatagcgcattattggcattattattgacatccagactggcggtcgaagtaattctgctcaccgtaggtttatcttcggctcaaatatccggacctcgtgttgctgtttcggatatatgttccatgaatcgcctccgtctcaattacaacaattcaaacagagaacatcatattcttatgtacctttctatactcccgatttaatccccacgtgcattctagtcagctttagtagcgtcccatggaccattcagcacaggcgataatcccgattcgcagggacagatgggtccgatctccggaccatgaaacacccacgtgtgagaagcttgaccgcttgacttcgaacttcaacggagtttctacttctagaaaagggttgcatgggtaaattatgttcatgtagtattgataaattcctcatttcgttcgctattttggctgcttggaccgatattcgtggccttggtaccatagcaacccgcattccttgaaatatatttatgcaaccatatgtgcggagtacatgcctggcactcgagacctttcctttctgttttacgccttgcagcttttttgatcttacagtaaaattgagcacaccctgatcagattattacataagctgattaattaaccttggaaaacggcggggtgacatgttaactatatcacgtgtagccattcccatttagatcgcccatcaaaaacagactggctcagtcaaagtgaccgttcgttctagctgtcttggatatacctcagtgaaaaaccactcagtagagctatttgatcgacttaccatttttccattttagcctatgctcctgagcatagccctcggaatccttcaaatgactatatattatcggccatgtcgcgatcatcaggagtctcgcttctcatttttcagtctttatcattccgatttgatctataagtatcctcttgccctggatctgaattgtgggactatgcttctcgctgtcgtattgttcaatggccttcattcaacaaactagggatagctcgtacgttgaggtggagttgcgacatcctgacggattctctactagttaagcatcagtacgatgcctacgttggattaagcaacaccggtttcttacacatttaagtttgaaaataggctaatgttcttcagccccaaacccattaatcattcgcttactaaatccgtgttgctgctatcctgagggaaacttccgcccggtggagcccctccgttgtgagcggctgagccgcaatacatctaaccggttcggtggagagcaatatccagggtcgcggatgccatggcgtcatcgaagcaagcgtcaatacctgcttagcatagacaacgaagatatataagaactatttgctttacttacctctcccatcttcaactcttcaactcctcaaatatctccctatcacaatactgctctcgactacgtcactttcaaatatttatatattaccacactcatagagaaactatcaccatgtcagactctaccttccacaccacaactcaggacatccgcaaggccgagtccaagcttgcccagtcacacgatggcaagcccccagcaaactccgacgtctctcaaaccaaggtgagttatctgtactgaattatcaccaagcataaagcagacctctgacacaatccatatagtccatcattgaccaaaacaccaacaagcccgcggaaatcgagaagaccaaggccaacctgcctctgcccgaccaacccccggttgccagtgactttaactcccttgaccagcgtaccactaatgtgggctctgggcgtttcgagtaccctcctgataacagtggcttgcgcgagggtgcagctgctagcagcagcgcccgcattgatggaaaggagctgcacaagagcactgccccatgatttctagggttcgttatgtatgatagtcaaatttttatcaagcattatgaccaatagtttgaatattattattaccatgtgacgataatcgcggtaaaatcggccgattaatagtttacttggagagaaccatggagagaaccaatgaatagtgcaaattcagaagtggctatattttcggccgacagtgtctgaatgcgtcagctaaactacatgtgaggtcatacatgtaattaccaaattggtgttcaaattatagtaaaagttggcattcgaacatatcatttcatttcaagaacattgaacaagattagcgtagggcagacctgacaccacccagccgttgggaaaaacgacggtatgtcagccgaatggttgacgaatattccaataataacaggttaccaagtcattgtgtcaaacttccttgaaacgtcgccacattacttaaagtctggacattctagcctccacaattatagcatatttattggagcttaggactcgactgatttccgaaaacaagatgtgatatagcttttccaagttgatatagaattggggttatttcgatgtcatcatcataacgtcaacattgggtacaagagccaaggagtttgtatacaaagccgacaatgaattcttatacagagaactgtaatccttttttctctatccaactgaagtaacacaatggcctccaacactcaaaaaacttacaaactctccactggtgctcagatccctgccattggcctgggaacctggcaagatgaggcagcccaggaggcatcagtccttgtagccctccagacaggatatcgccatatcgatacggcaagatggtaagttcctcaacaatttgacacgcataactagtctgacccctatagctatggcactgaggctgctgtcggcaaagccatccagaaaagcggcataaatagaagcgagatttttgttaccagcaaactgtggaacaacaagcaccatcctgatgatgttgctcaggcactgcaggatagcttggatgatctgggtttggaatacctcgacctatttctgatgcactggccttgtgccttcaaacgaggagatgatccattcccctctgacaaagatgggaagctgataactgcagatatcgactacgttgatgtacgtgctactttaaaccaatggcaaggctatctactaacaaatcaaagacttacaaagcgatggaagatctcgtcaaatccggcaaagccaaagctatcggggtttgtaacttctctcggaaggaaatcgagcgtcttattgcgaacgcgacgatcaaaccggcggtgcaccagatggagctgcatccctggctccagcaaagtgatttctatgacttccaccgcacgcatggcattcacgtaacgcagtattcccccttcggcgaccagaatcaaatctatggtgcccaagagaaatatggtcagcttattaatgatgagaccttggtcgagatcgggaagaagtacggaaagacgtcggcccaagtcgccctaggtattttgcccctgctcgcccggttcagaaatacagagctaataacttttcatagtttggggtatcgaacatggccgttccgtcattccgaaatcaaagcatccagaacggatcagacaaaactttgatatcaatttcgaattgaaacctgaagatcttaaaaagatcagctcgatcgacaggaagctccggttcaatgactcaagcaaagacttcggttacgaactcttcactgatcttgacggaaagcagaagtgaagtaagtgtgatttagagattacggtctttggaaacactggctgaagattgcctatggaggtgtcggtgttgatgcctgaagatgcgtgaatgttgctggcagaaaatatgaattattataacagaggacatacatcctataatctcttcaaggccgtcattaatgacttaagaaatgggttctaaatgtgaagctattcgtacctacatatacaaatcgggattggggcataatagacggccaggtgtattaaaagcatcaaggatggatggtgaaggttacgtagccagtaaatcaaaatacgcaacagtacggagtacaagataacatatattgaagtccggagcatagtactttgggccagaagcaatcgattattaggtcgctggattagattcacctagttagcaaattaaccgtcatccagtatgtgatccacacattgagccaaacgtccattaagggcgggaatcggcaatattaacccttcttgggtgtgttgtccattacatagacctccggaacaatctgtttttttttgaaatcaagggtttcaaaaaggtcgcagagcttctcagtgagagtttctgagaagttccttagtcagaaaagaaccataggtaactaaagtggattcgtggagatcttactttgtcgtgtcgccttgtgtattttgatatagttctcagcttcctcgttgttcgcgtgttgcggtatatatggatatctgtaaaacgaggcgcgttagtcgtaactatcaaaccagcattagtggaaatcatacttgcgacgaatccacatggcacacaagaaaatgagagctatagttagaggaatgccgaggccaagagatagcccaagagcaagcccccggtttatagctggtggactgtcgtggaaaccattttcaacccttatagaaagggcttggtactttgcattcatcgtattgacctctgcggtgagggcatcatgaaacttgccagacagaacctcaagcgctccttcccaatgactgatttttgcaatatcctcgtcgatcttcacagaaagagcggtaatatcctcgcgcatacgactgttctctttgttaaaatcatcaaacctcctagaaagagattggaaatctgtgctcgatccatcagtttgtgaattgttgccttggtttgtccttgcattgatagtgttgatttcattttccaatctctggcaccacgaccacagcgtgagaatattgtcgtcggtcgtgtaagaggagaacaccccacccatgttgtagtagacgcgggaatcaaaaatcggcgcagaaagatgaatttagtaaagaaggaggggcaagcaccttggtgaaatcatgcataaccgtttgattgccataagagaaaacttagaagaatatgacccgggactcttcataactctatttccgtccacgtatgagcggaaggtgtttgagatattatatacgctgtggttgggtcaagcttagtacaatgaacacaacaaccactgagcaagaaggtattagcatagatacccaacatagacggaaaaatatcttccacactgtggacttctcgtggatcgtaaggatataatgtaggataccacccgcgtaacgctcataatgaggtaagacatattggtaaccatccatgatctcttgggcattcctttggccaagtacatcttctatcaatcccttcacaacgaaaataaaatggctgcaggtcgatcttacccagccgaacatcatggtaggcataggggtagtttccccgaggatatatacctcgaccaattgagacgcatcgacatcaagggaaggagcaccttccttacgtgaaagatcttgaacttgatcgttccgaacgttcaaagcatgatcctcaaccggcaaacaatctatccgaggacttactattcgaaatcgacgccaataacttcaaacacgatttactcgaccctagcgtcgaccttctttcgtttatcctcgttcgatatcgaagaaaatcttctgttgaccagaatggcaactccagggcatagcgcagcggtcgagatatttgcttccaaattgatggtgaaattggctatcatggaacgagagaccgctatccaagggttcccaggagtaacgatcacagtcggcaatagagggaaacaacatgactatggatggggcccactccaccggcctggctatggccgtaagcgatggtcgttcttgaagttgcggtgtcggagtctaaagccaagctagagcgcgacgtggagttttggttagatccggccagaggaaacgctaacatagcgttaacgctagaagccgccagaaaaaagccggtcattgacaagacattccggtttagattctccgttgatcattccgtttgagatcctgatgcgacgaccaagctcctctcggaaaccaatgttagcatcggcatgcaagacctcaagggcattgtggaagggatctgggctgcccaagatttccgaaggggcgtatatacggtgtacctatgtccaggtactccgtaccttgtcgcctccacctgtgcacatgtctgaaacgcttactcagcaccacccactccccgggcccggacacaagtggctcttccacatgttgactccgaccacaattgcattttgttttgctttgtgcctcgagaaaaccgactctgtggctggtttttctcggtggcctactgctaatcctgcaatatccaggcttccccgcgcatcaataacccccccacaaaaaagcaccacggacgcgcaacatcaacattggaccgatacatgacgtctttgttgacacctacgattgcaacctcgctacgaagcactctcaaacgatcacgaacagcctagctacagccacctccgcgataattaccctgggactgaccttcaagctgcgctcctcgcggagttcgcgcatcagtatacccctgtcaccacttgaatcctactctaggactccggcttttataaacgttcattattgacgaatacctcccgtgcatgggttagagagcaaagatggctccaggcggcggtggaaatattaaggtggtggtgcgggtgcggccgttcaacagccgaggtgagtaaatatcgagggatggattcgtttttgagcctcaagctaaccagtctgtcattgtgcagagatcgagcgaggtgcaaaatgtatcgtgtcgatgaaaggcaaccagaccgtgctcactcctccacccggcgcagaggacaaatcacggaagggtgggaaaggtgttagtgaagggaacaaggtctttgcctttgaccgatcatattggtcctttgataagaaatcatcaaacttcgccgaccagaatgacctcttcgacgatctgggttctccgcttctggacaatgcttttgggggttacaacaattgtatcttcgcgtatggccagactggttcgggaaaatcgtactccatgatgggttacggcaaagaatatggtgtgattccacggatttgccgatcgatgttcgagcgcattactgctatccaggcggacaagtctttgaattgcactgtcgaagtgtcatatctcgaaatttacaacgagcgagtacgcgacttgctcaacccgtcgaacaaaggcaacctgaaagtccgtgagcatccgtcaacgggtccttatgttgaggatctggccaaactcgtcgtcggatgtttcgaagaaatcgagagcctgatggacgagggtaacaaagcccgaacggttgccgcgaccaacatgaacgaaacctcaagtcgatcacatgcggtttttaccttgactctgacgcagaagagacacgacaaagagacttcaatggataccgagaaggtgtcgaaaatcagtttggttgatttggctggttcagaaagagctaactcgactggagccaccggcgcgcgattaaaggagggtgcggaaatcaatcgctcattgtcaacacttggtcgtgtcattgctgcactcgctgatgtctctgccggcaagactactgccggcaagaagaagaatgcatccatggtaccatatcgtgattcaattctcacatggttgctgaaggattctctgggcggaaattccatgacttccatgattgcggcaatttctcctgcagatatcaactttgacgaaactcttggtactctgcgatacgctgactcggcgaaacgaatcaagaaccatgctgttgtgaacgaagatcctaatgcacgcatgattcgcgaactaaaggaggaattagcacagctccgatcaaaacttggagggggagtagcaccgggaggagcagctggcgcaataggaggtggtgtcccgcaggagtactaccccccagataccccgttagagaaacagatggtgtctatccaacagccggatggaactgtcactcaagtcagtaaggcagagattgtagaacaactcaatcagagtgagaagctctacaaagatctcaaccagacttgggaagagaagctgcaaaatacggagcttatccacaaggagcgtgaagcagctttggaggaattaggaatcaacatcgaaaagggcttcattggaatgagcacaccaaagaaaatgccccatttggtcaacctcagcgacgatcccctacttgcagaatgtttggtctacaatatcaaacctgggactaccacggtcggccatatggatcaaggtcaaaccgtcgagattagattgaatggatccaagatccttgagaagcactgcactttcgagaatgtggacaacgttgtgaccattatacccgccgaaggcgctgctatcatggtgaacggcctgcgggttgacaagcccacacgactgaagagtggtttccgaatcatccttggcgattttcatattttccgtttcaaccatcctcaagaggctagagccgaacgggtcgagcagagcttactccgccattcagtcacaacaagccagctcgggtcgccggccccaaacaaaacccatgatcgaaatctgagcaaggcaggatctgacttggatggcgattcatctagggcggattcacccatgccccaacagcgtagtcgtgagtcagactggttcttagcacgcagagaagctatcagtgctatggttggacctgatcagatctccaatttgcctgatgatgaactggatacactgttggaagatgtgcagaaggttcgagctgaacgacgtggactgccggaagaagacgattccgactccatcagctccttcccaactagggacaagtatatgtccaacgggaccctcgacaacttttccttagatactgctataactatgccaagcacgccccgacagaatgacgacgatgaagtcaatggcgttgcatcatttaaccaaactcgacaagatatgcagcggcagttggatcgtcgcaaggaagagttccaagaaaaactcaagaccgtgggagcttcgtctgatccagaatcgccggagctacgcaccgagaaggagcgaatggaggacgctctgcggacggttaaagaggaattcgaagagcaactgcgcaaacaaaaggagtcttttgaaacccacatccgagatatgggtaagccagtacctcaaatcttcgaaaatggcttcgccaagttagatgaacgtgaacttgaaatcgcgcgttcagtatacagccactggtcccagcgaaattatgtccgaatggctgagaagattttacaacatgcctgccttctgaaggaggcacagatcatgagtcatatcatggacaagcatgtggtcttccagttcgccattgtcgaccatggccacaacatggaatcgtcctatgatctcgtgctcaacggaatctccggcgatgaagacatcctgcttgatgaggccaagaaaccctgtgtgggtgttcgagtcatcgacttcaagcagtgcgtaattcacttgtggtcaattgaaaaactccaacgccgcgtccaagccatgcggcaattgcaccaatacatcgaccgccctgactacattcaacacttcaaactcgacaatccattctctgaaccttgctcaccccagtattctcttatcggtgatgccgacatccccttaaccgctgttttcgaaactcgcgtgcaagacttctccgttgagataacctcaccatatactcagagtgtcgtcggaatcattcgtctctctctcgaaccatcctccgcgcaggcgccctcttcaaccctgaaatttaacgttgtcatgcgggacatggtcgggttcgcagagtgggaagggactgatgtacatgcgcagttatttgttccgggtatctcagaggaaggaggcgcaactacaactcaaatgatcaaaggatttgaggacggtcccgttcgatttgaaagtgtgcacagtatgagcttgccgctgtcaagtccacggacagccgcattgaaggtctgcgtttatgcagctgtgacatcggttcatctcgacaagcttcttagttgggatgatatgcgtgactcagtggagccttcaccgcaaaagcggactgctgctcggatcgcggaatcagaattttactcagaagaacgtcatgacgtctttgcgagaattcagattctcgaaatgtcagaatctggcgagtacctccccgtggaggttgtccaaagcagcagtattgatgccgggacatcccagcttcatcaaggattgcagcgccgcatctcagtcaacatcacgtacagttcaacagaaactcttccatgggatgatatcaacaacatccgcgttggttctgtccacctcctggatccttggggcaagatcccagatcaggatttccagactccagacgtccccttgaagtttgtccaagaaccaacggtcaaagaaaatgccgacggaacctctcatgtcacaattgtcggccagtgggactcgagtttacatggctctctgttgcttgaccgagtgacagcagaaaagtacagggtccaagtaactgtccgttgggatcttgtatccagtcgtttacagaacccagttgtgttcgaggcagagcaaaccattcaaatccaaggccgtacccatgtccgccaacagtcgatgttcaagcaattctggaactcgattcgtgttgtgcactcgacgacttgcatgtactccttggttattcggcctatttcagctaagcgtgctgctgatctgtggcgtatgaacacacaaaatgactatgtgaaaggcgaggagctcttgaacacctgggcgcctagaaaagtttctctggtacgagactacattgccaaccgcaaacgccggcagcggctggcagagcttcacgcagcccgaggtgctctgagcgcgggctgtctcattccatcgctggctcgtggtgggaggtcaactccgatgcggggtgcagatctcaatgagcgaaaatccaaaattctacggaagtatcttgatctgtggtcgctcaagcaggacccaacagaggcaatcctcatccggagtaataccgaacccccttcggacggagcggcacacattaaaaattcggatgccagcggcctttatgataaactttctctcaaacctcgcttcacagccaccatccaaacccttcccaaagcccccgacgccttaaaaacggggtacgtgcttacgcccgatgataccaacaacgtttgggtgcgtcgtttcttggagctccgccggccgtacctccacatctactcggtcccagagggagacgagattaacgccatcaacctccgcaatgcgcgtgtcgaccatgcgcccgacttcgcaagactactcgacggttcaggagctggatccgaccgttcgctgtctgccaagggacgaccgaatgtgttcgcagtctatggaacccagaacacgttcctcttcgccactagaaccgaggcacaaaaggtagaatggatcttgaagatagacgagagctacttcaacagcaacagccccagaccccccgccaatggcgaccattaaaattttattgcggttgccaactgttgtgcgcggacatgtccgtggacaagcttcagctttgcttcccctgcttcgtgtttcattattacgggtctaagtctacctttacctttacctcctactttattctttcgtttgcccatttcctttcatgacctgttgagataccccttgcatatatcgactcgctatggcactctcgctcttatgtacataataatcctatctggatcatatattcgattgtgcacagtttgtttcattttggaaaagatcttttatgcagtttgacctgcatttctatttggtagacaagaacgatataaatatattttgcgatcgagatagagcctactggtctacctgtgcccattacctattaaattcaatcagaatatgtctatgaaccctcagcatgtagcccacaggacacacaggaccgttgccatggaaacaatcagagcacaaatgacatcaacccacaaaataactaccaagtcttcatctcttctaggctgagaactcatatggaaattgaagcttaaacattcgaatgggcaaacgtgaaattgttcgagaaagaatgttctcccaacgcccttcattccgctacctggctatcggcgcagtggtgtctctgtttgtccttgcattccttgtcctcggcacaggtgcaccctcgctctcatcacaatttaatctaaagacacaatcacgacagcaatactgtgcacctaccgtgaactcttccgctggctgggagtttgttgttgagcgcgatggaaacaaccacggtctctctgaggaccagtgccgcattgctttcccaaagctgtttgttgagattgacaagtcatctaaagtgaaagaagataagcttgtttcctataaggagctcaattccaggacagtggatgatggtatggtacggggaataattgatcgaggagaggtgagtgaaatattgacccttgtggacttgagagcatctgattctaatatatggtattcagttatatattgtcgactacgcccccatgcctgttacagcatctcgagcacgcgccacattgaactccctccaccgcgccctgacagcattcccagaccgccacctcctacccagcgtcgagttcatcttcaccacagaagacttcgcagaagacacaaccgccccaagtcccatctgggcctactcaaagcgtgactcagacacctcagtctggctaatgcccgacttcggttactgggcttggccagaggtacagattgggccgtaccatgaagtgcgccgtcgcattgccgcaatcgacgacggccagactgccgcagatggcacatatattccgggcctgcagttccaggagaagaaaaagcagctcgtatggcgcggcagtctggcgacgaacccgcccgtccggagcaaactcctcaagtctgcgttgggacgtagttgggctagtgtgcgtgttattgactgggatgatcaaaatgatatccgctttaatcttctgcccattgaagaccactgtcggtacatgttcctcgcacacacagagggccggagcttctctgggcgtgggaagtatcttctgaactgccgttctgtggtcatctcacatgcgcttgaatggcgcgaggctcatcatgcggcgctggtatcaactggcccggatgcaaattatattgaggttgaccgggattggtctgatctatcgcccaagatcgattatctcattgataaccctgcgattgcggagcgtatcgctaataatgcggtgcgcactttccgcgatcggtaccttactcctgctgccgagtcgtgctactggcgtcagttgatccggcagtactctgcagcttgtgatttcgagccggtcttgttttcgactggccgggatggaaagactcagccccggggtgttccgtatgatacttggcttcttatgcattgatgatctttgaatcggttgctattgattgtgtttttattgcatatcggtgtttttctttttgcgatattcccggttggcgttgaccctgatacagtttcaatttgttttgtacatgagatatattgattatttatgactgaatataatgcaaactagaatgcaatttttattatatgaaaacaagtatttcctggtttatattcgggggagtctagtagtaagtatacctttgccaagccttgatgccaagacctacatgaccgcaatattcttggcacgtgctcctgcttacctacgcaatcgccaagacctcgggattcgaaataaacatccgctgatccatggatcggtcaccttgtcacgttttcggtgactttatgtcgatttctctgatgatcaaaatacggtagatgatcatgcatcttttttttttgccggattttatattgcctgatatcaagtttagcctgggctaaccccagctacacctattacagcggtgatggatttccccgcatttgcacctgtgcctgtggctgacatcttcaacattcttgtcttcattcggcgacgaactttagccgcctaaagggtctggctgtaagtctcttagcttggatcactgataaaccaaattttaggctggttgaatgatacatggatttaattgaggtgatggactaccgctaagacttggtaggaaaggaatcatggtccgtggatgattggtgcaattgtgactgctgaagtacgggataaatggctcgctggctaaattgaaccaagacattcaggatatgaaactgtttggaaacacgccccacatcctcctgtgaatataaaagctcttctcctgaagggattctctgccataaaataacatatctcaattcattcgtcttcttcaattatcaacaatatccgacccttcattatggtctctttctcaagcctctttgtggctgcttgtgctgccgtaactgcctttgcgcttcccagtgagctggaaaagcgagcgatcaccacgagcgagcaaggaactagcaatggctacttctactctttctggaccaatggaggtggcagtgtctcctataccaacggtgcttcgggccaatacagcgttagctggaccaactgcggatctttcacctctggcaaaggctgggctactggcagctctcggtaagtcgagtccacctagttttctattgtccacatacttacagtacaccatgttagaaacatcaacttttccggttctttcaatccctccggaaatgcttatctcgctgtctacgggtggaccactagccccctcgtcgaatattacatcctggaaagctatggcacctacaacccagctagcagcatgaccttcaagggaactgtgaccagcgatggatcagtctacgatatctatacacaccagcaggtgaatcagccttctatctcggggactgcgacgttcaaccagtattggtccatccgccggactaaacgcaccagcggaacagtcactactgcaaatcacttcaatgcttgggcttctcttggattgagtctcggctcgcataactaccagattgtcagcactgagggataccagagcagtggatcgtcgtccatcaccgtttcataagcgcgtgaaagccctgcagtggcttcatgcgaaatgttcacttgctttggcaaatctttattggaagggctattcgatgggcctgttaagtctcattgtagtaaggaggtggaacgatactttgcttaggggaacacggacactttattgtctttaggcttatacttgtctatatataggcactcttggttaatatgacggtgcttttagcataactaacaaggcccacaagtcggccactttgaatacttcaacttctctttactttctctttcttcttccttctgtgatatttgtaggaaagtatggcattggtattgcctttacgttcttccttccgtccttgcctacatatgtctgttgttagcacaacacgcagtctaagagaaggaaaaagaggaacatacctgtagaggaggtagacaacaagcataaaaagaacagcggtaatacaatctggaatatcggctgctgccgctgtcttccagtcagacggggggtagttgatttttgtcttcgcgaggaatcaatgtatttcttctcttccgaatatcctgtaattggctttgtcggcctcgctcaaggaggtcactgtttctctcttccgtttcttgggcacctccggtattcccgtagacactgtcctctgcgggatcgaaaataggataggcttgtcacgctggattcctaggatcgaatcgatgtccaaaatggtatcatctcctaggcatttgtttgcggtgaagtcataggactgtttcttcccgataggttcaaggtagagggtgaaattatgctttacccgtgtccccactgagagattgcgtgccgtggaccatcagtatttggcgccatcgggttgacaggctgagatcactcggccaacttgaggttttctggaaaggtagagtgagtacaagccccagggtaggcgaaaacttcggcggggaccccacaagtccccaagcttctcaccttcctatatattgaggcttactgtgcgtaagtagacgagaagagggagagttgagatgtagtctaacgaggggtgagtacttgaggcacctagatggcgtcctgagaccacaaaatccaactgacgggtgcccaatcaaagggatagagagagaaagagagaggatttttttctgcaaacaaacagagaactacttatgtagctagatgaagcttatcaaacaggacaaacatggcaggctatttaacagatactaagctctctccactttctctcttccttctcctccctgtccactctcactctgacgagttgaagcaccttttttctctctatatatatgatcaccatcgtatttaggctctatctacttctcagcctccatctacccacggtctatatgcctgccctcctcccactttctttcttcttcacggcactcgaaattcattgcacatcgtgcttctctaatgagcacattcagcggcgacgagatcggcgtttaggaaaggttctaacataacataagccagacaacaagtgccgtgttcggctcgcaaggctataacattgcatttatagactataaatgctctggaaacataaccatgacgctgtaattatggataggcaggcaactatcaattttgttagtgggtttaaggctcctggactctgatgcatgacttgacggatttgattgacaatgcctggaagaccggagttcagaattgcaatcggacgattcgcatgttatatgaaagatctcaatgtcaagtatgggttcgtttccacgtacgaaaaagccgtcttgcgcgtcttctttcatcgacaattaagcaaaaatcccagggtgccgaaccgcctatcgcaccttcccgttttgaggttcagatcttgatacgccccgattcccacatatatcaccgaaattgttcctattctaggaccataccatttagcgtcgattacagcgcatttgaatgatggactacacgactgcctggaggcagaaaggcaatgatccgcgatgcctagtcttgaattcgacggggacatgatacggaagcgatccaagttctgctttctctgatgacggaactgataattcgcccgttggacccaccactgagaactacgttcaggctacatcctcatgcgcaatggaggcggagggtatcaagcggctggcaaagcgtttgctttgcgacatgcttgggctcatcaaaagatgtgccaatcttgacgatatggaggaaatcaatcaccttcgcctcaccggaaaaatccgttggtccgaaatgttcgaaaaggaggacgggttcatctatgaatagactgggaacatgggcgaaaagctgtgtcacagagtaagcctacccaaagcgtgggaatgctggctcagccgagacggtctcggtgatggttgtgatctgggtatctctcaacacgatgagtatgagagtacctaagagcgaagttgtattcgaatctttgcttgttcccaagtggtccatcattggtttttctctggtgcttgcggattgttatgttgagtgtagccgccttggaaccaacctctataattcagtctttcatgtattcaatccaaattgactcgtactcgtacaagtagcctcggttgtctctttctagttggttctagtgcttggtgcttatatttgaatgtgataatggcaaacctacttgaaatatatatcatatccatcagagaccatcacgtacgtacataaaacatcatttagaagatactatgctctatgaacatgctctagtcagctcttcgcgcttcacaacaataatatgagaatatatataatgtcgaacttacaaattcttgtattatttttatatcccctttaagggcctcttgcgatgcactaggcacattattcaacccccgtgccctttgacctccacttatgtacacatcttgtgcgcacattacataatttatattcccaagatcgtgtagtgacaacggagactcattccagctggctatgtccgaccggtgttctccgcgcgtggaatggtttcgatcatggaagttgggcgtgacaccggaggagctagaaggggactgcttgctgtctggcttggtagatatgatagatcggaatggaggtagggatccgacgatgatagctgtcttgattggtattaggattctatagtagatgtcgagcggccaacttacagattgacgattcaaccacactccatactgcaagtgctgcttggtccgaatatgcttttccggtgatagcaaccgctcggataattgccgctgcgataactatgatcccaagacagaacactatccctaacccgatcttttgttgcatattgatctttccatgccagatgattcgaagagggagtgacatgactgtttaatggtattaaatcaagaattgacacgaaagtagatggggtctttgtactcaacaagtccgtaaggatatcgactgcggtgctatatgatatggagataacagatcctctctgatcaattggctttgagcatttccctaccaattgttagacatagaggctgaaggttttaagaaacgggttgtctaccgaacttgaagtaattagatggcgggtgacaagtgtacaccgacccaatccaacatccgatatatgccaaggctgcgaacacaacggtggcccaccagacccgccggtaccgaggcaacccattggatatcatccagaagagtgctaggaatgaggcttttacgctccatagcacggaccagaatattccaatgatcgcaaactcgtagtgggtgtagcgaagtccgtggtcgacaatatctggcccggtcatattgaacactatataatagatgtgtggagcctgcagagtctgtaatactgcgttcgttatcaaaaaagccaaggcaagcagcatgaaatagtcatccgctagtagacgcttcacatacacgattcggatcgcgatacgagcagatgtaaacaggatgcttactcctgttcccgtccaagtgatagcaatgaggccggtcattgagagttcagttcccatcccttggggagtgggaagaatctccatagtcatgacgcagcactgtatgtagactttttgcctagtaagtgacaacagacaggacgctcaaattcgattcatggcgaataggtcatgagggggtaagctcataaggtaatctttccactcatttgtttgtgcacaagctagctgggaaggactgtgataggctacaattacttggtttgtaatttaccgttgcgcaaaagaaaagaccagggaaccctgccaatggtgaaatcgacccaaagagggggtaaaacgagggtaacacagattagatgaaacgaattatgtcgagtctgcatggtaatcctccgtataactgcacccatgatgttagtaggacaccccgaataccccgagaaactatttataaccctcacttttggatgaatcgagattttgcctgtgaatgaaggtgattgcttgtttattgggtcatcagtggcccagggcggcgacatccaaagcgctgagatatgcagcccggatttaaattgagcgacctctcaacccctgtcgttgtattcgaaattttcgttttgtccattagaaaagagactccacaaacagagtgactctgcagcgtttttttttttttcgctattagactttttaggaatcctagaataggtgttatacctgataggccgttcctcgagccctttaagttagccgccgacaattgagacctatatccgtgatctgaaagttgttgtgattgtccagcttttttgataatcacaaaaagtacacctaagatgactcgacgcagggaaactcgcgtttgtcatgcaggttaccgggtagccttccacatgacaccccaggaaaatgttcctgtatggttagaaagagatcatgtctaccgtagataccttcctaagtccaacatccaagtctacttttttagcaagtctagcgatggtaccaaagctaatctcgttgttgcaattcgctggtttaacgtatgcggcctttcaggcttcatgcaaatgcgtaagcgaaaaacaacacgaaaaacatcgacttagattaactcactatctagaccccaggagatccatgttggccctcattgagaatatgggaatccctcaatacaacagtatctggaaagctggtccgcaatctcccagtcgctatctcatgttaccccggcacctacgaagacgaggatgaatgcgcgtatgtgtattcgcaatggtcgaattccactttccaacaactttcccccgtcggttactttggtcctacagaagatgcttgccctccgattgacatgcgccatcaatcacctcgcacatgtacgcttggtccagctccagtgtataccatcaatgcaacagagcctgaggaggtagtagctggtatcaaattcgcacaggagaatcatgttcgcctcgtcattaggaatacagggcacgatatgttggggaagttagtaacacacgatgattcaacaaaggtactattctgactaatcacttcgttgtagatctgaaggctatggaggactacagatttggatcaagtacattcgaaagggaatatctttccaagaaaggtatactccatcgaatggatgtaggagcagcaattgggctggctctgcaatcattattggcggaggctatgtttggcgagatgtatacaaagttgcctttcagcgcaatctcacggttgttggcgggggagacccggttggtgaaattcttcccccaacaaaaagcaaagttctgattttgttccaaagaccgttggttgcattggaggttacacacagggtgggggacactcgccagccagtcatgactacgggcttgccgcagaccaagtactagaggcccaagttgtattggcaaatggcgatatcgtcacagcgaatccttgtcagttttcggatctgtactacgctattcgaggtggaggtggtggtacttacggcgtcgtcacgtcgatggctgtcaaagtatatcccagcaagcctgttgtcgcacagtcgctcgaaatcactccactcgccaacgacacggactcactcttagacgcgattaccgatatctaccagcaatatcccaatatcatggatgcaggattctccggctatggatcctggtctattaacagccctatgatgaaccaaacacctggctatatgcatgttgttgcggccatgaacaagtcccttgtccagtctttggaagttttcgatacacttttccagacattgcagaagtataacggtacactccttcgtatatcagttatatggtatgagttcccaacgtatggggcatacttccactccctctctggtatatcccagccagtgagggctgggtctcccaactcggctatgacatcacagatgtttagcaaagctgccttgacgactagtcgcccttcacttcgcaacatgattggtgtcactgcgggaaattctgaagagtgtgcattggctaatgttgagctcgtcgggggtggaaaggttctcactggagcatctgacaagtactccagtgtgaatcctgcctggcgatctacctatattgtcagcgtcgtggctagatcttgggtgaattactcatctgctcaaactgtcgaacatgatatcactcatatcaagggagctgctatgagagcgctcgatccattccttggaagctacatgaacgaggcatgaatattcttcttttgcggcgaattaacaactttactgactgtaagaaaggctgatcgcaatgatcccctatgggcgacggatttctatggtacaaactacgtgttgttagcgcgaatcaagaaaaagtacgatccgacgagtctattctactgccagacctgtgtgggtagctcatcttgggctcagcgatatcttgatggagcaaattacggccctctttgttccactgggctgtgatgcttgatattgaatgagacggcattaaaaatccgcttgaaaccttgccactgtctgatcagcatagtcacttttaatagtctagcggcaatagacatcgaggttaccatggatatgttcttgaacatagggataatctccatatttcccttaaatgacaccaagtcagtccagtaccgtttgcctaatgagtgctatggagctgtatggattttgtaagaaacgactccatagatcgttggtaccttccaggtcacttccagtttgctatttgcttccttcctttgttcatttatttgttctttcctttccagggttgtttgcactcgagctaagcgagacgttcgagttttgcatcgtttgcaataaaaccagctatataaacaggccgattcccacttctgtacttacttcttctctctcttcatcatattggatgaacccaaccacatcccacatcccacatcgtgttcatcatccatcacatgacttgtctgttcttactttcatccttcagccaacccaaccacattgtccttctatcttctaccttctaccttcttccatcatccatcatccaccatctatcgtccatcttccactttatgaggtttgtttctcatctgtgttatcacctactcttcatcatccatcatcgtggtctataatacctgatgacatggggctgactgtactagatatgtgtgctcacatccactcatccacttcatgcatccacttcaatcaaccatcgacattcggcattcgactactgcgatgcttcgaccttaaaagaggaggaatgaaaagaaacggtcttgaacgacagagtctccgcaggagtgtctctgaaggagacttctcgtcgggaagaggttacagcgtgtacccatttaaaggagactctcaagaccgtttgctgtggtggtataaaaaaatggtcgcctcgacaagcatgcatcgacatccaagaaccacatccaagaaccacttcaatccatccacttcaatccatccacttcatccatccacttcatccatccacttcatccatccacttcaatcaaccatcgacattcggcattcgactactgcgatgcttcgaccttaaaagaggaggaatgaaaagaaacggtcttgaacgacagagtctccgcaggagtgtctctgaaggagacttctcgtcgggaagaggttacagcgtgtacccaattaaaggagactctcaagaccgtttgctgtggtggtgaaagtatggtcgcctcgacaagcaaacattcacattcaagtgtcgatttccaaattccacttcaaccatttacttcaatcaaccacattcaatcgaccacgttcaaacatctacttcaagcaaccacattcaatcaaccacattcaatcaaccacattcaatcaaccacattcaatcgaccacgttcaaacatctacttcaagcatctacttcaatcaactacttcaaacaaccaatttcaatcaaccacgttcaatccttcaatgaaccatatccaagctccacttcaatcaactatccaaattccacttcaaccatattcaaacatccacttcaagcatctatttcaatcaaccacattcaatcagcccaattcaagcagcaacttctatcaaccacttcaagatcctacattcaaagcatccgcattcaaacttcagtcaaccacttctatcattcacattcagccttactgtgatgggtttcggcttcaggaccatttgcaggcttgcaacaacagcaaagacgaaaggaaaagagaaaagaaaagaaaaccaaaagaaaacatctcgaatgatttcaatcagctacttcaggatcctgtatcccaacaaccacttcaatcaacaatccacattcaaccatctacaatgcttcgacctttaagaagaggaatgaaaagaaacggacttgaacgataacagtctccgaaggagtgtctctgaaggcaacttctcgtcggggagagggtacagtgtgtacccatccaaagcttcagggcaattggcaggcttgcaacaacaatacaaaaacagaaaagaaagaagaaagaaaatacctcgaatgatttcaatcaactgcttcaagatcctgcatcctaaaaaccacttcaatcagaaatcaacattaaaccatatctacaatgcttcgaccttgaagaggagaatgaaaaggaacggtcttgaaccacaagagtctcggaaggagtgtctctgaaggagacttctcgtccggaagaggttacagcatgttcatttaaaggagactttcaattgattcatttattgattctacctgagtttaattcttagctgtggtttatgcctatagaaaagactatgtatatatgctacacaataggctgctacaaggaatgttacgaatggagccattatctcttggcttcagttcctcagaatgttactcttcgaaaaaaaccgtagatccgatctccagatattattatggcctagtttagactgtccgacgtctcgtgtccaccggaatgagggagtcatgtgggaaattccacgccatgcttagacgaagcaactgaactcccaatatttttctttctccacccgaaggagtttagtgcagatagcagattacagcgaacagcatcaaaatcgccctggaatgaagcgaatgtaactaaaataccaggaccttctccgtaggaccggagaattgtggatttcaagggtgttgcgtaaagccctcgctcttgcaagaaaggatcggcggacgcgcggtgttgttgggcatggtccgtgccctctacgcctgaggcatcaatataaacttgatcccaccgccgaggccgaccttcagatcgatctttcgtatctccaacaacaattattgagtgaaccatacaaaacccacaacgatcaagatgacctcagcacctagagatgcactggagtttccagattcagataggggcttcttagagcctcatctacctcctcgggatggctcggcacctgagtctgatctccccttcacaacactcacattcgcgacctcgcttgacgcttctctagctctgtcccctggtgcacgtacagttctttctggaccccaatccaaggcaatgactcattatctgcgatctcgccatgacggaattatcattggcgttggtacagcagtggcagacgatcccggtctcaactgtcgaatcacaggagttgggggttatggcaagcccggcctagatggccagcctagaccagttgtgattgatccgacagcccgatgggacttttcagacgacagcaagctgttccaactttgcagagaggggcgtggccttgcaccatggatcatcaccgcagttgagaaaccaaacgccaagaaacaagcattactggaaaaatacggcggaagatttatcccagtcaaaatgcttagaacccacaccggccgacatcaggttgactggccagatttgctcgtcaccttgaaatcgaacggtctcaacagcgtgatggtagagggtggtggccaggtcatcaaatcccttttgtgcccgctttacatgtctttgctggacagcgtcattgttactattgctcccacgtggttgggtgaaggtggcgtggtcgtctcccctgataggcgctttgacgaggatggaaatgcgatctccgcagcgagattgaagaatgtcaaatggtacccatttggggaagatgtcgttctttgtgggcagatcaagctctatgactgagagagaacatcttggatctttttaccttttaaaattgatcaaccctcaagtgcatgttccttcgatctgaggattccagcccagacttcgatatgttttgtctcgtggccttactgtggcaacttgtcaataaaacattacactatttcatctgctaggtcatgtttcccactccaccggcgtacagtttatcccaaactttccgttgaccccatttgtccaccacgagccaattggaaggcctgtacgtatgtatcaaaaatatgtcatgtcgtgcgttttgtccctaggcattgagggaagacttccgtatgaagaataaggaacatacttctactttactgtgggaatccacttgggaacaccggatcaaatatcttcaaatcaacactcaacgctagtcgcagcattatatattgaggactatcgtagttgcttgaactcaattcgaataatatttctgacataacagaagacattaaaaatagccttgtgtcattcatttctttctttatctgcaataatggtctttgttttcggaggatttaattctgaactaataggaaccaaaaacaattaaatagccccgatgtccacatcatcgggactccatcagggcggacctcttgatcagtgctcggagcctggaattcatcgaccatctctaggtactaaccattagatatacagacatttccgggctctacagacaatgccgccactaaacgatagtgaatagcacgagcgtatgctcactgctctccggcgaggaattcacgatctgcgctccaagccagagaatcgcatgctggtaattgaacggttgaacgcaatttctcgtctggcacgcatctgtgtacaggtcgggaaggacgctcgtttcacccggctttgtgacacccttcagagagaaatgccacgccaaatcgctttgctcaagagtgatataaatagtaatcttatagttgcaaatgcgctcgcccaaatgatccttgaatcgtccacgtttactcgctctatcgttgtttttaatagcgaggatgagaccgacgagcaaagtgagttggatcccagcgatgataactatattgcacgattgcttcttggttcgaaatgggctaaagaggtagttgaccttccggaagagccatataagatgcctgaggtgtttggaagcgctcgtgaagatgaagctgagatggatcccagccatgatgaccatattgcgcgcctgctgcttggtccgagctgggctactccgatagctgattttgctgaggagccatacaaggggaagaaggcggcgggtaagtgattgtagatttgttaggtcgcgcgaatggtcttctctataacagttcttacttgaatcgatgtttgttctagatgaagtagaggacactttgtattgtgggctggaaatatgaagaatatcatacaaatcctaaattacatagtttctagatagtatagagtggtgagatcgttttttatcattcagagcaacgcattggtgttttttaatctctgtaagccaagggaaaagatgggccggtactatctttcctgctagatgttctatcaatatccggccgagtcatctcacggtgaataatgttggtcaactcctcttgttcactgggcgacgtcactgtgtctcgtctttccaaagcagcccttcgttcatcctcgctgtccgatgttccgcttctttcggcatgacgtgacgcttgccgtctgacccgttgagcctcttccttctcaaggattgcagccgtcacccgctccttgcaagccttttcttcgatttcctgttcaatgcacgcgtaatgcgcccttctataaacaccgattgagctggacgtgatgccaagaatctcgtaaacgaagagaataggcagcgcgaaatagagttgggggttgcagccagaagaccatatgtcgatgagtacctggaagacggaatgtgctggcagggcaaagcccagtttgtagaaagcaggtgccagctcaaatgggagaagaatggaagtgacattcgagacaacccacgatatcagcgccatcggcacgtagggaggcggaagccagatggtgaaagtgtctagcacgaggaaattcacatgtgcaaaaagccataatgccagccaattgagtgcgaactggtttccattaacactccagccacttttgaatgcccagattgcaccggcggtacatatggacccgacaagtgtgtaaattgaagagatgactaggcgcgcaatagcgatgcgatgggctgacagcgaggtgtagagtttgaattgaacgtataaaccattgatagtaccaagaaagaagaactcttggattacgatcaagatgataactagggtgttgtagacaacccttgacccttgttctgtgggttgaatattgttgtcggccaatgtccaaggatcgtagaacgctgcaatcgcagcaggatcggagctgttgacactctgcagagactgtttcccgttggtttgcgagtacgccaaacgtgcagtttccgataatactttcatgctatctgcaaggacggtgtcaatcaccgttgggtagcgcgcttcattccacaccatggtgagaacattgttcttatcatacgaagatgcagctgctccacctgcgagtgcggcacttaatgcgttggacgcatttgctgtcgtgtataatgctccccagtatttgatgtcacagactgcaccttcaatcgagccgggctgggggtacgctgaggcagatcgctcaacaagggttggaaagctgggtcctttgaggctttgaaacgcagcgcgggccgcgtcgcttatcgcaccaccgtcgtagtctacaaacaaaacattaatgttatgaatgtgtgaagactgctggaaaagggatccgaataggtaacagaatagaccgaggaatagaatttggagcagaagcagattgatagcagatgcctttagcaagccgaatcgacgcggccgaacagatgggtggtggatgctaggccgctgctctcgcgctctgggatagaactgcatgtaacccggtggagcgatagctttataccagatgagggcgatgatatgaatgtcagactatagatgtaagaagtctgtgatgagcctttcgacctccgaagcaacgagtcccggtcaaaaacaggtatcaagtcccgaagcccggaggggattgtaagtgggtcggcagagtttaaaaggccgaaaggctttcggaaagatagggtgagacgaattattttgaactcatagccctacgaggtgtagagtcaacatctacctcaagattctgtgtcaagattctatgacgacatatcctgataaaggggaaacaagtcaggccacttgatcgaaggttccaaggcagaggcggaaggattctcgggccccacagtgattaacgtcgactccacttccttattatgtaatccggacttggcgaccgttttgggaaggatcccagcctgaataaccaggccgaagatcttatctctttggcccgggaaatggccttcaactgtcctctaccgatatcaatcccaatccggtccgttttttatcatcttaataacaccagcatattaaatcatgatggtcaacttccggaaatcaccggtggaacctttcttcgctgtcttgcggtgttgcaccactccttggtgatcacctctccgcgtgtatgactccggttctgtgatttttgtgaatatctcaccctaccggtaatgtcgagttacagtccggattgagagcagaatggaggtgataatggtacttccgggggaggtgaaaacccacagctgaatggcactactcggtgatgatgagcaagatatcgactcctttttgtctttagctgattggaagggtattcccaagctcgatgctccttttaaaggaatgggacaagtttatttgatgctacacgcgcaggatgcgagagcaaaatatcactaatacgctaggttattccttagttattgccacgaatcttcaaatctctctatactcaaccacaatgaacgcttcctcaacaagccagatataaatctcaacaccaatcaacattttacccaatctccgtctattggtctcacaaatgcagagtcatattgaataattaatgttgaataatcgatgttgagtaatcaatgttgaataatcaaaatattcctcggcaggccaatttctgatattcccaggcggccctcgctttagccgcctcgaatgggcttcaaatactgctttaggacgatagaaacctcggcataggttttaagaaggattattgagaagtaatctacctcggaatactcgccaattaacgattaccctatcgttgcattcgatccttcctcataagagagcgtcgtaacgatatgtacctctctgcttcttatctgtttaccttccaaggatattgtcaaaatggtgcaacttgatgacggcctggaggctgctacacacggtaccattgatgttttacagtcatcatccgacgatacgctcgacctggcattcgtcaatactgcagaaaagcctaaaagtgtaattattctctacaaggcatcctagtccgtggaactcaatcttattgtgtcccagtatccaaaataccccttttcaaaaaaatcaaccctcaaaatgttgaaggttgagtctgggctccactaagaaatccacccgaacctaatgagcttaaaatccgttgggagagtataactcaacctatcccctaatatgaataatcataaaataatgtcgtcgatataaagagcaaagtctcaatcctgatctaggtgtattatcttcacggtctatcataatacagtactattccgattatggctgctcctaaaataaccttatatttcgacattggcagtccctttgcctggattgcgttccatgctttgaaagtcagtcgaacatctcgaaggacttaatgaatgagaaagctaatgattgtcgatagacgtcccctgtctttgcaaaatgtgacattgaatatgttcccgtctccgtgcgaggactgttccagttgtgcaagaacacgccccctttggctgtcaagagtaggtttctcttctttcttctatctctaacgctatgtactacggattctatatttatatgctaatctcccattgtagacaaggcccaatggttgaatcaagaacgcatttactgggctcgtcgcttccatgttcccatgtccgaagcgctcccagaagcatttccagcgtccacttcggaggtccagcttgctctatgccttgtggctaaacaattccccgataagattatccccatcatggataagatctatcgtggcttctgggaagagggtgacgcgaatgtcctcactcagctcggtttctctcctatctttgaaagtgaacttgggcccgaaaacgctaagcggatcatggatgaggtgcgtttttttctggctcaaatgactcgtatttcttctctaatattgttcaacagttcaaaagtaccgagacaaaagacattttggatgaaaacacacaacaggtcgtcaactccggcggctttggtttgccttggtttgattgcatagatgcacaggggtcaaaggaaagcttctggggaattgatcatttgggacgtcttgtggattttttgcaactagatgcaaacctagacaagtctttccgcgtcttactctagcacgacgtgttgaagcttagtcctggtcactaccgacccttcacaaccctttagatagacgtcagattgacctaccagccgcatttgatttgaaataacatttcctagattatcagtctcaatatctggtagataggcggctaactcatatgtatatgaatagtaatattactacgacaagaaagacccaggaactgaaattaatttgtagaatactcgatatattgagaagttaatgataagccttcacgagtcggctccttcgtggattggggtacctcggaagaagatcctcaagggaggagcagctggctcggctttacactttacgccggcgactcgaggtggcagctccgcaaagagctcgcgtgtcgcacccgagacagattcattctttgtgatctcctgcaaatatcgtagcacgatctaccactttccatgggcaatagcagaatgcttgctcttagcagtaacgctgtcaaaccaaagcttgacctttgtggcaagattcacccaaagatctagaacaagttagcctataaaagttcaggagtaagtgacttacttcgaaggtaaaactttccggctgggtctgtcctttcaatgtccaggaactcggcaataaatcggaagcagaaagtgaaatcttccccgctaaatccattatagaagtagctgcaagggcctcctcttcggtaatctggagacagcatcgtgtctaagaattatacaaagaaagaaatataccataccagatatatatgttcttttggaggtgagagatagatgaagaaggttagattctacaatgatcgagatctagctaaatagctaggtgaagccaggcatcggcatgtgatcggtacgtggccaccacaacaattttgattctctcttattatgtggtaaattcccacctagcattctctgaggaagtaacggataatttgagatactgaatgctgaatatatttgaggtgttgatgtatgtaccctccttcctaattaggccggcacctacccgaaaacttattccgccataccgccctccacaccgtttgagattttatgccgctctagatagttacctgcaatttatatgtaagccactaacaaaatcaggtcacttttgtcatatcaactgcttcatcaagaactgcttcatcgtcaaggggttaaatcctatagggatcaagtagaatgtactaatttctctgatcaaaaaaggaatgttttttacggccagaatatatggcaaaatccatggtcgcacccaatctggaaggtcgtactccgtactgaaatttgaggcaggggggtaaatctaacaacaccttatatttactcgatactatactatcgtccaagtttatatgcgaactatgtgttcagtagagggggtaaagtcattattttactcacttggtgacgcgatcccgcattgaatggcaacatgtcgttcaatcaaggaccggccctagctaagtcctatttggtctgaaccatgttacgcagtcttgtcggtcttcctaagcgatctatttgcattagcactatctttcgtgaacccctccatctaaccggatttgcccttgccatgctgatcctgcacatactaagcatttgattcatcatcacaggcgcaaatgtcaccttataaacatacaattccttcggattttccccgcggcactactgcacaatgccagatagcgtcggattgacattcgctacgagcattgcgcaatcttaggtgtagggcacgagtgacaatatatatcttgtaaggaaagactcaaatccatattgtggaagttgtcaaccagactcaaaattgataatgtcaagcaaaagcttatcatcgcttgattcaaagcagccgatagtccaacagacgccggttccgaccacaaagaatgctgtaaaaagtggagttttggctgcgggtggttcagtcgagttctatgaacccatcgcggagtacgaaggaaaacatcgatatgatccacttgccgaatggacggagaaggaagagcagctgctcgttagaagggtaatgaagacctttcctaggattcctatactatggaccaccgactaacatttgacatgacagctcgactacagaatctgttcttgggtctgtctgatgttcttcgcacttcagctggatcgtggtaatatcggacaagcattatccgacggaatgcttgatgacctcgggctatcaactaaccagtacaactacggcatgaccatattctatctttgcttcctgtgcgcagaggtgccgtctcaaatgatctccaaaaagcttggccccgacgtatggattcccattcagatggttctttggagtgtagtggggatttgccagggcctagtcagcggcgagcacagcttctatgctactcgagcacttctcggtctgatagaaggtggctttattcctgacgcacttctttacctatcctacttctatacaaataatgagctacccatgcgaatcgccttcttttactgttgttccagcggtactgctatcgtcgcggcgtttttggcatttggaattctgcacatgcgatccatcggcggctgggaaggctggaggtggctgtttgtgctcgagggtgctgttaccttcactattggtgtcatctcctggttttatctacctccaagtccgacgcaaacagcaagctggtttcgagggaaagatggttggttctcagagagggaggaagttatcatggtcaatcgagtcctacgagatgatccggcaaaggtacgtataaagggatttcttttcgaagttcatccatacacatactgactgtgattataacagggtggcatgcataatcgtcaaggtctgacactgaaacttttgcgggacgctctcatggactacgatctttggccaatgtatttgatcagtctcacgctgctggttcctattaatcctgaatcagcatatgtgaccctatttttaaggtcacttggctttgatacattcaaggtcaatctcctgaccattcctgcgaccgtgttattcctgatccaactcatcttttggtcttgggtgtctgaaaagatcaacaaccgcatggtcattttactattttattccttttgggttttccctcttctgatggcactagagctgatgccggtgactgcaagtccttggagttggtacgcagttacagttctggtcattggttctccatatgtccattctatcaatggttagtactaatatcttctcacaacatctcaaattccgaatcctctgaccccgttcttcttatagtcagcttgatctcgcggaacgccggttctgtgcgcactcgcactgtgggtagtgcagtatataacatgctttgtcaaacaggctctatcatttcttcaaacgtatgttttgtgataccccgggatatccttttatatcgttggttggttttatgcctaacatatcttctttttcagatctaccgaacggatgataaaccctactaccgaaagggaaacaagatccttctggctcttgtcggatggaacgttttggtcaccatcttcattaagctctactatatgcggaggaacaaaaaacgtgagcagctttggaatgctatgagtccagatcagaaacagcattacttgagaacaacgaaagatgagggcaacaaaaagttggacttccgatttgcccactagctcctagtgagggcggatgatggtgggtgcatgttacaaatttgcatttgcacttgacggtttcaaaaatattcgagatgaatatacaattatcttttttacacataatgttaaattcaggcgttatggagcgctttatacggattcagcggtcttatccgctaccttgatgagaatgattgcagtgaatatagaacctgaacaacaaatggagtttttccaaggcacaagagcatatgaatactttctacccttgattcaaaattccccatgattttccatgattctgatgttgaggtttggactacaataacgaacagtgcaaacatgctaattatgtgcataattgtgctgattaaatctatgacgccaagaccgagatttatgcacaaactgtaggcttccttcgacccaacttggtaagagcacaccgatccatcctctcccctattctttcttgtcggtttattatctcccccgacacactgtcatgcactggcgcaaggctctagagagaatgacatatctccctatctagtcataccgtgctcgctttgacatctccgtgaaaacccggtctcagtgttgtcaccgttattatccctgtcaactccaacgccgatcataggaagtagtcggcgcaaggcccccgtgacatcatatcctaagtggaaagtcctcaccgactggttaggccttcactgtcatctcagccgccataatgcggggtaatcgacaatggaacaagctcgatgttggacttttctaatgaggaaggttattcttcgatccgatatcgatggggcagtcttgaagtagtaaaagatcggtcgatcggacgatcggacgtcctttgcgaaggacttcacgtcgctaatgttatagttgcttctatgttcttttgttaagtcctgcatgctaaagtactgttctctatactattatctgctctaagttctggtgtctgaagactagaagctgagatcatacagatggactgtagtgtacgactagcgccatgtgtctggcccctgatgaccacgagtgccaacacatgaaagccatgcgcctcgtgtgacccaacttcaccctgggccctatttcccgggcctatcatcgtggagaaacagacattggctaggggtaaattgttggagatatcatatctgggctgcatatttccggattatttcttggcttcgggtcgctttctgtttccacaatctatcgaattttctctcccttgcatcatgttactactgtcggagctttgacccttgatcgacgattatatacccctagtccgaagttccttgccgcatctggccgagcttggcggtttgatccgcacattctattccctagtcacccctagccacccgccccgtgggagatcttccggcctaatctatacgttgtatcatggctctaaagcacagctgaacttagactggcttcaatggtagaattagaaattgtatgcggtcatactgacaaatttaatcatctcaagtccagcaacgtggagtcaagtcgcagggcattcacccagtcatcttgcagttatctagggatacccggtccttctcagaatcagaattctagactcgaatcaaataatggccctcggccgaataaacccaatctcatttgtgccctcgccaaccaacatcctctatggcaagggatttgaggatatctccaaggttcttgttgaagtatcaaggtgctttatcttcccttcttttgttacccttccctttcaaagtcccctagtgatctagcgagtccttcatttgcaacccgtcaaacgcaccttttagctttcaagtattccataacgtagcccaataatagggttccaaaaatataaaatataaaaaaacgccagcacaacctcgcacataattggatggaccaaactacatttctccgagtcccgatgccacctgatggatctccatatcaggcgttgcggctgtggctttcattgtttaatctccttcccactgctcggagttaatatgcccctcggggccaagcagacgcccagcatgtggccttacttcaggtgtcttggtaccctaaatccaatgccgactctgttcccctacattcggacaatgtcggtcaaatatacatataaggacttagctcccctcctccgattgatgatcagcaacttggatcttcgagacctctatcttctgataattcgtccaatatgcggtctttcatgaaatccacttccacatggggtctactaaccctatcccttcttccggctgtcctgagctcgcctctattcgaaaagcgaatcaagggcccctggctgggcctgaacaccaacttcccggatcccagcttcatgaaggcggccgacaacaaatggtatgcattcggcaccaacggtaacggcaagcgggtccaagttgccgtttcaaatgacttccaaacatggacactcctcgatgtcgaagccctccccacaatatcaacatgggaaactgagagcgatcactgggcacctgacgtagtgatgcgagtaagttttctcggcttctaaaaagattaaccctaaaaattaactatctccaaggacgacggaaagtacgttatgtattactccggtgaagcaaaatcagatctcagacaccactgcgtcggcacagccgtagcagaccacccagaaggaccctacgtcccaagcaacacgcccctatcctgccgcctggatcagggtggctcaatcgacccagcagggttcaaagacaaagacggcagtcgctacgtcgttttcaaagtcgacggcaacagcatcggccacggcggaaactgcaacaacggcgtcgaaccgcttgtttccacgccgatcctgctgcagaaggttggcgccgacggtgtcacgcctatcggggacgcggtgcagatcctcgatcgcagtactgctgatggtgatggcccgctggtcgaggcaccgaatctgattctccatgggaatacgtactttttgttttattccactcattgctttaccgacccggcgtatgatgtgcgctatgctacggcgcagagcattacgggtccttatactaagaccaatgttccgatgattaatgctgcgaatacggggcttatttcgcctggtggggggaatgtttgtgggtgcggggatcggatgttgttccatgggttctgtactgaggagaagacgagtaggtgtatgtatgtcgctgatgtgactattgatgggaagacggcgtcgattgcttgagagattttgtttgcattttgcagttggtccggtttcatctggactgtggctttggttgatatataccccgggttttgagggcttgcatgtgatatgtggtgacagcaatgatatactgtttcgcgatttcaaacttgaatacttttcgcatataagtagagaacaactgctcttcgccacaaggaactgtagaatcacaattatgaaaagcacgtacacaaatgtagtagaattaaattatttttttatatcgtcgtatcgtcctaggcccgcctgcatgcaccccagatttattcgtccttttcctctccctcagcttcttacttttcatcttcctttgcctcgtcctctagctgtacttcactgacacgcctcttatcccgtacctcttgcacccactccgctgcaccctgaatcgctacctcgggtgtctccttgtggttgagaagatatccttggatctccgcagcggtaagctcaccactcggaacaacagcagcaaactcagacgccaagtcagtgatacgagatcgaggatctttttctttggccgttttcactcccccattactcttgtcggagttttggataatctcgctctctaccttggcgatgttaccaacaataggagttgatggcaacttgactagcccattgataccattgatgtgggttcttggcgctgcgatatgggcaatgtcgttattcatagccccgtaaatcgagataaaaagctccttgatatctgcttcgcttgtgtacccgaagctgatcttcatgtccacacgcccgggacggagaagagccgggtccagcctgtcgatgtggtttgtagtcataatgaggatacggccttcactggcggcaacaccatcaatcacgttcagaagtccggagagcgtgattccgcccttcttcttcgtgtcgtctttggcagctgtgccatccgcttccacgccagattccttgataacaagatccacggggttatccgaagtagatgtaggcgcagattttgcggcccgagcctttgtaatgcctgctgagtcgatatcttcaagtaggataatgcatcggcgtggtagttccgagaacaataacgacagactctcctcttccaaggccgtggaattcagatccaacaggtagagcttcaatccaagcagtccggccgctgcaaagcacagactcgtcttgccagtccctgggggaccgtgtaaaaggtatccacgccgatatgggattccacggttgttgtaccagcggcgcgtgcgagggtgcaggtattctttgatatcatcaaggaagtcatgcttcagttcttgatcgagaataacggtagaaagaggacgcgctaaccgggccatacaccgatgccagctgaaggcttggccggcggaaatccgcgagccgcggtagattaccgtgcggttcctgtcgcgctcaacataggcctgttgtgcctccgctagcagcgacttcaagatcgcaggattccgaccgagacacgatatgaatatccgctcgttgttcattacataccacaaacccccgtctcggtgttcgcgctcgagcatgagcggtcggttcttgtaccagaagtagtggcagccttccgcgggagtaaattgcatcttcttgtacttgtcccgggtggtgaccctggcccagtatgaatcgaaagaatcgttcttctcgccatcgacagtctcaccctcggcttcttcttctctgtcgagctcctcttcatctgttatactctcgctccagtaactattggttttgatgcctgcgacgaatcgatttgtatttctcatatgcggctgacgtgagatccagaacatcagataatggaatgcctcatcgtcgaggcgaatttcggctcttgacacaaacagctcattgaagttcgcccaaatggcgaatacaaagtatcgagcagttgcgccaaagacagcaaggctgaccaggagttgcaggtaagagctgacatcaaaattaaggtaagataccaacatgcgcgatataaagccatagccggggactagaacctccaacatggccgagtccgtcttggacaaaggccccgttgtggggatagtttggctggaattcatgatcgatagatctgaaatgctcgagtttatttcgcttggatttgctggtaatagagtaggaggaaagacaagataggaccctgcatagcaaaatcaaagcataggccagtcttttatggcccggggaacatatttgagcctcgtgtgttggcctttcccgctcagacacacatatgccctcggccgagcctgagatgtgcctgacacgcctcaattcgcgaacatgcccatgcagcattggtcggagttgattggattggacaggatgggattcagttgggctggttgtgggcgtctgcctggactttgactcattcttgctgcacgtcgctgcggtacaatttcctacgtcatatcgcataattagaccgaagggtaacatttatttatacgccacgttcgtatcgagttaattttgagaagataaaagtgaaaagcgggagcaaaagaaaatgatttttgccggcaagtgttgtgttagaagtaaacggcagacattgttatgctttaaataaacattggacccttggcctagtctaggctccagtggcaaaacacaaatcacattgcccgagcctcgccgttagtgtctcactttatctcgcatcgcgcacttctgcctgaagaaacgttggggctttttgtttttcttgctgaaaatatggccatcataagtcagcctaaatgcgtcagttctatgcgtaatagaagctcccatccattgttcaatgtaagcttaatgaaacaagtctaaaccgaaaaaaaaaaaaagaaatctctccctcggggaatcgaaccccggtctcccgcgcttatcggttttaatgacaagcggaaatcatcaccactagaccaaggaagaatgcgatggccgagttactgctcggccacttggctggttgatggaaacagtaccccaccggggccccatacgggagtttagaataacctcaatactaaaacatccaatcttctacttgatatcactctattctcgtaacaagttaaaacatatttacatagtcccaagggagggagatatgtttgccacatatttgataaaattatctgaacataacggattagtagcacgatgaataatgggactttgattgcctaggttgaagtttaggcacagtcagtataaatctatcacagagtatactacttccttcacttcatcctccacctctatctactattacttcctgaaccactgatctggcccaatagtcgcttaactactccatctctatctccatctatatcttccctttgttcatagccgaacccctgtaagccgtttatccccagatcatcaataaaaccagctggaatctaaagaatcctaacaatggaaacagactgcccagaatgtccttgggccaggatgcccctcagctgactcctatttcaaaggctccaaagcgcagcttccaagaaatgttcgacgaaagttgctgcatagttgacccaaatgattgtggaactgatggaattgacttcaccgagaagctccctgataccaccaccttcctgtctacacctcagccaacggacaaactagtggaaacccacaagaaactgaaaagactggctgagcttatcggagaaggcaagagccttgccatccacactaactacgcaaaggctccccaaaaagagcgaaaccccatcgacgaggcaaagaaaagaatgcggtcaatcgagattgagcagtacaatgcctgggtcgctggtgccgtcatgcccactgtcgattggaaaaatagtaacaaaacagttgaacttcccaaagctgaaaagtctcacttcaagcatcaagttcatgccattcgagagatctaccctaattcgcacatcactcgcaagaacgcacactggttcatagctaactttcgctatgtgatgcctcttattgaagcagtcgcgatggtacggcgtgtgcggtgggagtatgtctgcgaccaagaaggccccagccggatagatctggcagatcaagaactcaccgaaatggagctggcggaattggaaacagctcgcagtatcatccggatcaccattaatacccttcagaaaagacaacgccggttgcaattggatgctactctgagggagaaacatttaagcttagaaacggtgatggaactcactggtgcagattgtgaggttattcagaaacgtgtcgacaggatccatgagagcgctgtgcgagacaaggggacgaagtgttccaagactaaggaatagccggatgtcagtgtacgtctagggattgggtctgttgctcatgtgtcctctcgctggctttctgtccacctgctctatgtctctgtgattatctgttgatgaaaaaaccccaagaatgaaatgttttaatgctagtctactactccagttccaaataatcaaaacgtcgtcgcttctactctcgctcaattccttaaagagctgcggcctggtcctgatgttattctagtctcgcgatcttgttatctttaaaagaggatccgacacaaaccgcatacctctaatggcctacagttttacactgaaggaaagtaaagattatgagtcttcaattctgctcgcaactacactgcccaggactttgaagctcattctgtgttgtcctttgtgaagagccatccattctgggcatcatatgatcgagttcaaagcacaaaattgaagccgataggaaattgtgaagcagagagtgagggcacagaataaaggaacgacgtgtgttggtgtaaaacatgaggagagggtcggggacgtagaggaaggttgaatgggagaagcacaggacatgatcgtcttgtgaagagagacttcagacaagacaattcaacctctcgcacttctaaacccctcagtattcttcttgcgattggatggcatccccgcggtcctggatgacctcacaggccatgcgaattttggccgccagtcggtccactcgccgttgttcctcgctcacgcgctgttgttcatcggcgagggttttcatagcaacagtgacaatactgcgtgttgtattcagttccacaagctccatttcggcttcggtgcggttgatttgatcgtccacatacttctgctgcgaagcctgcaccttcataactgcattgatgagaggcatcgcccatggaaagttggcgatgaactgagatgtggcgtgtgggctgatctgcaggttgcggcaaatttctctggcagcatgcaggaactgaacagcgcgattactgtcttctaggccatatggaatcataggaagcccctgggctttggcccactcgacagtggggacgatatcaccacgaatgtaggcttcgtactgttcgatctcgagggcggtcatcgttgccttggcatcggtgatagcatcacgctgaggcgttgcattctttgtgtgaatagcaaggcttttgcctcttctaacaatggaagctagtctttccactttgtcgcatgtttccaccagtgaatccgctggcttgggtgtagacagaaaactggccgtggcagggagagtctcggtgtagtcaatgccgcgattgcttcgattgtttttgtcgagcatttcttcgaacctgcgcttccgagccatggtactcggtatgatctgtgtgggcccgatctaacgactctctgatcaatttggcttttatcgtcagcattgcgaatgattgttgatgaattgagaacccgtgacccttatcgcagcttactcacaggggctgggtcccatggaacaaaatcctagaagttagctattaatatggagcgaagattgatatggagataaagatgaggttgagtacataccgatcggtgggaggagtggcgtgtgatggaagaaaggaaagagatgaagaatgaagtgaaggttgataactgccaccacgaatgtttgcattggctctgcaaaagatcgtgttatttgttgtaactaagttctcaatagcctaccgcccaatctctctgagccccagactgtgaggaatccttgtcgggcttggataaagtaagcttataattcaaaaagatactaccaccataacaaatgtgaggtttgtgtatcatatggaagattagaccgctagctaggaatggaactacttggtacaaatatatgttggtcgagatcatttgtatttttgaagagcggtttgagtgctttctttcgccattctttttgaacgacttcacaacatccttgatctcttccgggcgttgaagtatcatacgcacggtctcctcaacaggctgaacaacggggtttcaatagttctcaagacgtcaccaatcactatggagagggtctcacatcgggatcaactcctagtcagaaattgccaaactaggtatgcacttctgagctgagaaggaacccattctcggtagagtagaggcgagaatctccaatctcgctaatgggtcgagtattggtcatgtactagaccagttgccaccgtatctccgttcctatagcatgctgacggggaatatatgctttagcctcaaggccaaggaaagactcgcacgacccggcaattgcatggcaaccatctcttcgagagcatgcaacgcctcgtgaatgctatgagacaagtagacgatatagcttccccgcaagagcagtttataggtgctggatatatggatcgaggtagtccgcggccggggggaatctcaccgggcaatcctctcagagcttgtgaatcgctcttcggagtatagttatgtacccgcagtggtccaaggccccatgccaaataggcattgctgtaatgaacgagatggattcccgtttgagaatagaaaggaactggtactgacgcaggcagatggtcttgagacggtgccctcatcgcggataaaccaacgaaaggcctctagcgccaagcctttcgcctgcaaagtatcgatattcgccaaagatcacgaggtaccaaggctcgagccaccattctagctgtaacaaccaggaggggaaaacaccggacaagacatgtaaaaatatatatgcgaagacgaagttctaatatcgaaagacgaatttaagctatatatagtccccgacattgataattgtataaataagagtccaaccacagttatatccacaattgagtgcacgatgcactatattaagttgtaccagggccagataggaggaaaaatctggcagagttgatgtatgtaggtaagctcatgcactatgtgtctaacgaaacaagaagtgatcaacagaggtgagttagattgataagaataatctgagacttgtcagctctctaaatagcttgatggagacaacgagagaaaggcccgaaagccatcaatgagacaaggagaggcctgggaagctgtatgaaagtaggaaaagccttagtgcgtacgcctgattgcattaagagtctacgtagaagcatataacaacaaagccaatcacttttatagcaaacaaaatttcgcaaaattatccgcctatcatggcgacgcctgtgtggaacaaatcatgaacctgactctcctctaaggaccgttgagattatttctgctgaggttgtaaggacctactccctgccttgtttgatcttccttcttctctttctcttatatactgagagaatgagtataatttaaacattatatacgtgaacatgggtatctatcaaaatgtaaagctaaacgcacataattgaacaatcaactgtcagattccgggtgtttgccttgaacagcatcggcaacgccaccagcccagttcttaaaatcatcgagtttgtgccagactgtgccccaccacgtcgaacccttctcatcgtcactttggtagtctgtggcgggtggtgcattggctgctgtagtgggtctcggtgctggccgtggtggcttgcgttgtggaggtgatggctgcggatatgcaggttgcgaaggccctgctgttggtgaagtttgagccgggggatcaggtggtgtgtccaaaaccggtgcgttctcatccgagtgaaggccgactggcttcagcgggagtcgtagtgtgccattgcctggaaggggattgacacccaaagagtcacagacaatgttatatacctcgatgttttctatacagattcgttaggtcaaattccaatcgatggttcggagcaggtacttacgaaaaacatccaatcggctgtttggcttatgagggaaggctgggccgcgcgcaataaatattgcacgcatcaatggatgctcgtggtcgtacccgtgaatacctcgaggatggtattccttcccagtcttcaaagcctccttgacatcgaactctgaccgatcaacgagagcccatcccgccttagggatgacccacaatggcgcaatgcgttcgttgtttgagaagtgataccgttcaggcattgtctcccgtgtgtaaaattcaaaagcatgctcgtaatccggagccaccttctccaattgtttgcgaagggtctccagatcctcaggattcttggcgcgcagaccaccagatggccacccgtcaatatgttcaatcagatcataatcaatcaaatcgtccaactgaaccagcctttccgtagaggtagtagccatgccgtggtctgagacaaccatgatgtttaccacgtcggtgagattgcgttgctcaagaccagtcataatgctcgcaaccatgctatccgctgctgaaatggtctttcggatttcagtgctattagggccaaatttatgcccatctcggtcaacgtcaggaacgtaagctacgatcaactgcggccgctcaggtgttatctgcgattcgtcctcaacacccggtagatccaaaaacccaaggacccgatccgccttgcgcgacaagagttccgtcccgttatatttgtccaaaaagctcggctccctgtcaccaatgtgcgcctcagaccccggccacatatggatcgcggtcttcacgcgctgcttttctgcggtcacccagagcggttccgccatccaccacttgggttgcatgctgacagtgggatgggtatagtagaagtcttcctttatcttcgggtcccaaaatgtgtttcctacaatgccatgactctcgggatatagtccagtcataagcgtgaagtgatttgggaaggtgacgctcgggaagctcgggttcatatattgcggggaaacgccattggcgatgagtgagttcagcgcaggagtcaggccacggtcgagaaagtcggcccggaaaccgtcgagcgagataatgatagtggttggcgcaaagagagctgtgccgttggagagcaagcgtggagggtgtgctcgtgaagcccggaacccactagaggctttatacgcgccgaggaagaggatgacgaagagtatagcgatgagagtagttataaacagtattcttcgccatgaaggccgtggaggctaaggagcgaatgtgttagcaagaacatagaaaccagccatggtacgtcttacaggttcatatctgtattcgcctgtcctgtccaaatctaacgatgatgcactcaaaacagaggcattctcgtcaccaattccctcttccatctcatacatcagctcgccgtcttcactgactctctcccgccgtgaccccctccgccgtcgccgctcctttttcgtcttcccgatcttcacagtgctaccatttgggctgaatatcctccgcagaccatgtccagtgccacgccggatcagaagattctctagctcctcttcatcttctagcactgcccggtcgtgctctgcaatttccaaggtgctgcggtgctgatcgaggagcgcgtcatcgtcggaatctgagtcctgctcggagggtgaccgcaacgaagatgcatcgttgtcgtaattggcaggagaaagaagggaagaagtagggtctgggcggcgcattgctagcctggtgaagacatggaaaaagagttgagaggagaaagggagattattgccaagacccggcaatcagttgcgataagcccgatctatggcgttgtttattttggttattttgacaattacatgactagaataagatagttttaactaaaaaattgaggacgactaagcttgctacgtcaggttagattaataatcctttgttgttcacgggttgtgtacctgcttattacggctcataatccgatcaaggtagtcgagatacccaagcagcagtcggggaaactgctgggcgattgtgaaagcccatttcaaatgtgagatatgtccatagtgcttagaggagccctacttcatatagttccagcaaaccaatgcttgaggagatattccgattcggatacggaattactaaatcccggatatcaattccttgaaagattccacctcgcaaactgcaaatgatgagacaagagccaatattaccacgaagctccaacatcgcaacaaagttgggtcatacggagtactctgtcttgtacaatcaccagatccccatctctacgcctccgatgtgactgcctgcagtgatttttgtagaaagtaaagctcgtaagtgactagcatactggggctattctctatacttgaagcccaaagctgtcaaaccccattaatcactatatgtctacctagctataactatattgtattgaattgatatcgattactatggactctgttgacgatatcccctgattgatttgccattgatttacgagatactggaaacacctcccccctccatagacaccgtacccctatcagatccaatcaatacggtcgccaagcctcagctcatctgcatgttgcaatgtccctgggagggttgtgcgcaagattgccctcgtctaattgacgggcacccaacatactcggttaagaggggatcttgagagcggacctttttttagggatcagtcggaggccttcttcttatacctaatctacaccattctttcattttgcacaaacttctttacttccgaccgattagttaaacgaaagtcatggagtcaatgaattggcagaccgacatcaagcatggtgattcgttgcctccgatcaactggacagctctcttcgattatgctctcaaacttagaggcaaccagcgcatggaagttttatccactcgatcttgccatattcccccatcataccacatgggcggagttcacctggtgagagtcctcgaatttgaggacggcatgaagtgggttgcacgcatcccattaggccagtgcaccagcgacaccaagaaacgcttgcttcatgaagtccacatactttctttgcttcgtgagcgaacggagatccctgtcccgaaagtgttcggttatgagacaaatgggaatataatcggccgtgccttcatgatcatggaattgatacctggcagtactgcgatggatgcttttggaggctgggaagtgcgcaatggtgaaataccagctagattcaaatcagcgttctgccgcagtattgcagaaatacaggtaagcgtctggaatactcgcctacggtgagacgtcgactgactaacagattgccatgtctgaaattcgatttcctaagattggtatgattatgagacatgccggtggttcatacgatgtcgactcaatacctggtataggaggccccttcgaaaccgcagctgaatattttgccgcatggagcaacaccgtcaagtttccaatgcgagacatcaatatcagatcccgtttgccaagtcattggcatgatgaagtgcctgcatcaatcggaggttttcctgataaaatcaaagaagccctacatatattatccgtcaaaaacgaaggccctttccccctctttcacccagactttcgacatagtaatgttatcatcgacggtgattataacattctgtcggttattgattgggaacatgcgggcacggtcccgtggggggtcgtcgattttccactgttcttgggtgttgtaccttccccaatggatttaccaacaaattatgatgctgagggaaaccccgttggcgaagagacacggaagatacggagggaaaggaacgattatgtgcaaagtgttagagatttcgaggagagaggctctgacaacagcctttctactattttggcctcgccatatattcagaatattgcgactgccctgaggctatacgagaatgggaaacttgggctttactgtaaactgttcgatgagctctagttagctatcaccctttttgtagacaccgcacccctgtcaaacccaatcaatacgctaaagttgtctctgggctatgcaagtttctgtcaggctgtacgcctaataaagatccctaaaagagaaatatatatcagcttgcatatgtcatctgaggaatatccatgtcagttactccgtacattgtcgatctgtgaggggctcgtcacatgacatgtatattgacataaggattatgtaagatactgttgggacagcggttttagtacatactacgggacagtctaacctaattaggagaggtcgctcttagcactccattttcaattatttagagatcacctgatctgtcaaacatgaagctattcagagatcacctggctaatttatctggtctgtcaataacatgaagctattcaattaatctgctcaattggtctcattaattggtttgctcaatagacattattatgaagctattaagagatcgcctaattaatcatctcatccgtcaagatcactaaatcagttcaactgctaccgatgatatagctaatttagttccgaaaccggcatttgcaaaaatggatagtttaggttgcaagttatccatggattttacctacttttatgttaccaataaccgggatcaactttgttgcttgaagcgtgaggctgaaatacatagccctaaaaaaacacacattccactgctactgcggggaatcacattcctcaaattgatcgcaaatgacaaagatcggacatgacgaacttgacgtgaaagctgcttagttgaccgaagacagagaagcatgaaaatgtaaatgaccgatacttaagcatctcgaagtcaaattcctgatgttaggtgagctgcgttgatgtagactcactagatgccggacagccggatgcagttgttaggagactggctgggcgatcagctctgcgcaggtcacagccttgctaactttgatgttccgagaactgccaaagtcctataatgccatgatagaagtaacacggcagttaatccccaaatacggttgttacgaccagttctataggctatgtgtgctctaccagacataaagtacgtaccacctgccttacagctagagaagtagtgatccttgtgatatcactacgcagagagtcatgggtagatgaccgctactttatgggctcatcttcctagggggataagatgctcttcaccccattgtcttccaagactccacttcttcagacaatgtcttcagtgtatggtcccgaaaacaggtgacccataaatagaatcaacttgtctcttattgtctcatctctgaagtggatcactgtggaattccacgttggagtgttcgacgtgtgatgtccgcttgcgagcggctacttcccaattgggataccatatcacgtgacccacctaagccagcgagatccccacatttcggacgaacagcaacgggggaagatcatgacggagttggtgtcggcctcgtccgattgtatcagatcaaagtggattgagtctatctagaacagtgcgattatccccggatgcggaattcgccttgatctcgttttcgatgccaagacaagaggaacataaccttggaatttttttcctccaattactgatgccatcactaattaaccttaattacttagatgccggattgggaaccgttgcaagatctataaagatgccgtcctcttcacggattctgctatgtccatctcaatcgcatctcaccttaagtaagtactcgagcaccatgatctcaagaatatgtactaatgcccgtcctagctatatcgcttgttaaagaacaggccttatctcattccttgatccaaatcgtgtttgttttccaataaaaatgcacttcacagccccctccgtcgccttgctggctctcgcagccggtgttcaggccggctccaaacagctgcaggaacctcccgtccacgtgaagggtatcatcggcaagcaacgtgttgagcctggtactgatgttgctcctaccggtgctcagactggtactcatcccattggaaccggcattgtcggcaccggtaccagcactggtagccaccccatcgtgactggcaccccaggcggtcccggcggcggtgttggtaataacagcactatcattgtcactggtacatccccctgctacacctgccacggtagcgcgaccatcccagtctatgttcctaccagaactcagggcacctccccatccggtggtgctggttctggcactggctcaggctctggcactggctcaggctctggaactggctcaggctctggatctggctccggttctagctctggccctggctctggttctggatctggatctggctccggctctggatctggctccggttctagctctggccctggctctggttctggatctggctctggctccggctctggatctggccctggctctggttctggatctggatctggctcaggctctggatctggctccggttctagctctggccctggctctggttctggatctggatctggctcaggctctggatctggctccggttctagctctggccctggctctggttctggatctggatctggctcaggctctggatctggctccggttctagctctggccctggctctggttctggatctggatctggctccggctctggatctggctccggttctagctctggccctggctctggttctggatctggctctggctccggctctggctccggctcaggctctggctccggctccggctctggtatcgaaggctctggctctggctccggctcaggctctggctccgactccgggtctggtatcgaaggctctggctctggctctggctctggctctgtcggttctggtggcgtcaacggctctggctccacctctggcgccggcaaaggtgccagtccctccagccctgtctctacctctggctccgacagcacgaacgattacagcctctccagccctggctccaaggttaccgctccccagatcggagtcgttagcgctgttattggcagcatggtctacggtaccattatgctgcttgcataaacgtcttaatgttcaaatggctgtctcttaatgttggtgattggttattctaattactgggtgtatttttgtctttttcgatatctgtctgggaactgccttctggttagagatatgattagattagaaggcgggaggagtactggggtgtctagggaggcgttggaggatatgatttttggtttttggtttttttgtgtttagcaatgagttatttggtaatataccagaacctaatatgattataattctaattcaaaagaatgtttacggttattacttctcgaacttgtctgtctacgtgaacgtataaagatgaactcgaatatattccatcaacacaaacataatgtatttcatcaccagagcataaaaaactaaggctcctgtctaaggcctagggccatatcccagcctgacaccaaaagccaagcctacagctcaaagtataatcccaagtggcaaaagaacagccctggtcatacatctcgtacatctgataaaagcccagaacgcagtttagtcgtccctgcagggtcgaatggcacgattctcggccgtatggctttgttttagggtttacgtttactttaaaggttcgcgtgtaaatatccacagatggacggagattggcttgatcaaggtttcagattggcttttatgtaactgctttgtgtgtgtgtgatccatggtttgaacaaccctgtaccctgtaaggctactttcgagattacgagataacaatagattgtgcggtgattgtaccgtagatttgccgggtcaaagagattataaatttagaccatgattcatgattttgaatttgaaaattgcattatgacttatgattttgaattttaaactggccagacacacctatatataaacacttttacaagtcgagtctcatctttcgcaagaaatgaacagaaagccacccaagcaccatcagaatcagtgcaacgtacaccaacaaggataaagaaaagtaaggcctccaaatcgaacggtcgccgtctcgtctctacacactcgaaatccaattcacccactgacacccacaccccccatcaccaccatcaacaccgccgtacacctcagtcgtagcattcttcgtctcatcaagacccttgaatagtcccgcagccggattaacaaggttgccgccgatagagcggtcctcgagctgcagctgcacggcagtgatattgtaatgcccgtcgttttctagcgggtagcagtataccattttctttttctcggctccgccgtgccggtccacggttatggttaccgggtatggaaatgagcctggccgggagaagtctgttgcggaggaagaagatgtaggggtgttagtggatgttgatgtcggtgctgcggaggaggtggcagtgctatttgctgtgctgttggattgtgggaggagttggcggccgattttatctggttgcgtccagacttggacgaggaaccgcgtttgggaccatgtgcatcggtagcgtgcgtcggcttttgtgctcccgccgtttgtgtccgcggctgaggatttcgtttgagaggttaggaatatggatttgtcgaagtagctgtaaaagccgtagtgctcggttgcgagaccgcggttgtagaggcggattggctgggatgaagggagtgggtacagcattgctgcggatggggttccgtctgcgttttcttccggtgccgggattatcgatgagatgttcgggtatgcggtgccgttggtgctgtctgagcggcggaatatgcttgccgaggagagggagactggtgagaggagggacatgtagaagggggtttcttcgccggcgtagggtgcggcattgttgtctgtgtattggccgaggaagctctgctctgcatcgcttggggctgccggggatgaattgaagaggttatcactcctaacacgtatattcgagctaaccgtggtactgttatcgtatgtgccattgcggaagcggatggaaacacggaaatttggctggttcgcattatacggctcattggcattctgctggcctttgggcaaagcacaactccacatcgaggagggagtgatgcaggtcgatctttcaagctgtggctgcgtcccagcgagtgttgcaatgccagtcggcatgggcggatagcctgttaggttcagccactgtgattgaacgggagtatcggctcctttccttgttagggtgatcgatagaacagtagctaagatcacgataatgaagaagaaaacgcagatcaggaaataccatctccgtcgagtacgaccctcgcgccctggacgtcccgttttcttgctgaatggaccccggccacgccagaaaccacagacccttcggccggtggcttcttccttttccagtctgcggcgtcgagtctcatggggtcctatggcgccgcttgggttgacgctcgtaattccagctgcaggatcttgattgtagcttggctgcgtatcatagcgatggggtagagcagcttctcgaggatattgcgtgtatgcaggagccggtgcctccatatccgacattggtatcgagccaggtccgcccgcggcgcgctggaaaccgggagagataggctcagaagcatgtaaaggtcgttgaggggcgagttcagatccttcagataatcctcgttctgcttgcggctcgtcagacacatgctggcgatcctgagccgaggacgcctggcgtcgaacagtaggctgggtttgtggtacaggcggtacaggcggtgcattcgagtgagggtgtgcgcttgcactaaatggccacccagacccagattgccgtccttggataacaagtggccctcgaggctggtttgcataaccataagttgcctgtcgtgtctggggaggagtttgtccatttgaaacctgagatccccgagaagttccttgtgtaacagaaggttctcgtggctgtccttgtccatatgcccattcaaaatcagaagcttgttgatgggtagatggcggttgaacctgcggttgctcttgcggtcctcgttgtccccatggccattctgacctcggtgttgcgacttgagggggtggctggaccatcgggtcctcgattcctcgcgacatttcctgcggctgcggctgtggctgttgcaatatcggctccattggtgcagcctgcggtgcgaagatcggcacatattgcactgctggttgcacaggctgtatctgaggctgcggtgcaggcgaagtataatgaatattagtaacagggggtgagatgttagtgattatctgcggagaaggagcgggagttggctcaggcataggaagaggggcaggagggggagcggaagctggctcaggaacaggagccggcgcagaagcctgcgcagggccaggtgcaagagctggctcaggcataggaataggaatcggagcgggagccggcgccgggggcggggccggaccccgccccctgnnnnnnnnnnnnnnnnnnnnnnnnnnnnnnnnnnnnnnnnnnnnnnnnnnnnnnnnnnnnnnnnnnnnnnnnnnnnnnnnnnnnnnnnnnnnnnnnnnnnnnnnnnnnnnnnnnnnnnnnataggaataggaagcggagggggagccggcgcaggtgcaggtgcaggcgccggctcctggacctgtctgtcagtcacctctacaggcgctgcaacaggatccgcaacaggcacaggaacaggatcaggatgcgaagcaccacactgacaccgagacccagaaacaccatccctagcactatttgccgccacagaccccttctcatccccatcctcatcaacaacagacgaatcccacgaattcgaactgaactccgacgccggcgacaacacctgcacctccttcgcgcgaaccgcgtacccagccggaatcgtcgacgtccgcgaacgaggcgagtcaatatcaataagcaggcctgtgttcttcgtcgatgtcgtcgacggaactggagtctggtttccgcgcgtcccttcaagatcagctccgggctccccatctgcaaacgcaagttctcgactaccatcttcagccccgtttgtagcacccgctggcatcgaacccgggtttgcgggcgttatcgagcacacgtggttgacgcatgcgaagtacggcgttttgctgaatagctcgtgtgcgcaggcttggtagtactcggcggcttcgccttggattgtttggttgttgctgaacatgaaggacatggtgttgtgtctggttgagacgtttgagacgtatgcgggtggtggggattgatggcgttcgggggcttgagtttgagcttgagcttggtattgatattgctctggttcgaaggatcgggatatctcgaatgccttttccccggtcggtgcggcggtttctggtgtatctggtgagaaacaggagatttctttctcgcgccggatccattctttcgggcctgggcgggttgtggttgttgttgttgatggggttgagggtgagtcttgtgggaaagatgggctgagtggggattttatggaccggcctagaagaggcgagaggagatatgtccaccagccttgtgaatagggtctgttttcgtctgcttgggtgttgacgctgagacggccttgttggtgctttgggggcgggcgtactgtttctggtgtccggggtggactggcatcttcccagattgaggctgttgacagggcgcgcgcgttccgatctacgcctagtgtattgtggtatccggtctctgggataggggttttggtagcagctgagtgctgggcggggatggctggcacgggtggcacgtctgcttcatattgccagagacggggtgtgggctgtgagtagatgcttgatgttgctcttggtcggagcatctcggtgctcgagtttgagtgtgcgttccaaggtgcatctcctctcgctggcgtgacgataatcgagggtgtgagcggcgtgcctgcaccgtcgtgctcttgtgatctttccaccgactcgctgcgaggcacagtgagtccgatcatgacatggcggtctgagggtgagattacatgctgctgtctatcgtggaacgtatcttcatctttggcagcaaggaacgttccagtttcattatggctgttctgactctgcaccgtctcagataaccgctgaaagccccgtgaagtcctcttcttaaagatctcccttgacttctgagccgagcgttccttctcccgcactttggaaagcagcttgaggtcattcagatcgacaaagggcgcagccgcatttgtatccggaatcgactgtttcctcggcgccggcgccaagctgaaatccgtaaccagattcaagccgagtggtttcccgacgcttttgcgcttcttagtgatgcggatattcagtctcgagctttcgcggacggaaacggacgagcgattcccatctttagcgctcctcgcctcgagcttttgtcgcgttgccttggatagaaatgtaaagggtcggtctccttcttcctgatcttcggaggagcctgagggacttaggatttcttcgctgatcggcgatgatagtgggaagtttggtactgggacctggaggtctggttttcgtttgaacatagttcagtagacttgactgtgtcatgttagttgcagaaatgagaggactcaggtgtacataccatgtgtcaggaaagcatgaaaggacgaaagtgtagaaagacaaacaaagagggtgtctattaatatgatagcaaataaaacaatggaggcaacaatacacaatagcgctgaatagagtcgattgagtcagatgtagaacaaaagaacgacaaagaaataggaaagcccgagatttaaatcttcaaggtctatttctgcatcatcacagtgcagaagagcccagcccgatcacttacagcacagctcgagctataaacaacccagccaatgatcatcggcgctggggaatttctgcagcgatcccagacatcccgctgcaggtagctccgtgctgcatctttgaggtccgtcattggacggctggcagagagatcaccaggggaagaggaaatgaagggcatggattggacgagatgtcagactgaggccagtcactacgcgccgagccgggggcgggcgcttcgagaggccaattagtggaaggacagaaatagatctccagttagattaattgtaatacatacgatttgaagtctgaaacatgttttcgtgctactgttcatattccaaggatggatgtcatattccacgtatagatgcttttgaatagacatggatatccatattccagccattccagctattcaatgttcgtattccatatcccctatcttccatgcagagtggcctcatagaaaaaaaaaaaaagcaaagcaaagcaattgcgggtatgaataacaaaatatgaggaaaaaagagaccactccatgagatccaggaaaaaatcagtataaaccaaccccgaagtcgccagtcgaatggggatcgcatctatagagggatatatgataccaagagaaagtcagaaacgaagtcgttgatgataggttttgcgtgactagtcatatctcatacacagcttgagctttcctcgcacctcacgccacctgccgtcgctaccgtcgctcatactcaatgccctgcataggcgcactggagccgttcataagaggcggtagcgtacgcggctgctcctgggtcacggcattgccgaacccgttgtaggggccctggccattgacctgggagttcatttggtggtggtcgaacatggggcgggggacgccgttggcttgctggagctgagcgcgcatctcatctatctcggactgcataacggcccggtcgcgctgcgattgcgcgacggttttctccagcattgctatgtaatcaattgcccgtgtgagcgtctcccatttgctggatttgttggtttgcccgggcggtagacgcagccggagcgcttcgaagcagtctttcatctcgcttcgccgtttgcgctcggctagtttgtgcgttacgcgcagttcgggcgtacggctgtacggtgtgctgccgggcggaccgtcttcttcgccgatcaactctcttactgccttgtgttggagggagtggtggtggtgtacattttggggtaggtctggagattgttagtattgcgcgtgcaggatgtcttgcgcaggttcttaccgtgttgacctcgtggcatccgttccgagtacatgctattcatagactccgccatacttcccttccgggaaaacgcagggttggattctcccttcgagctgacagagcttgagcgcgccacggccgggtccgggaaggcatatgccatacccgccgtgggtgcttcagcattgtaaatctccgaccgaggattcgaggaaatggccggagcagtgcgaccggctgcaaaactccgctgctggtcggttgcgcgagggcctagcggagagagtggctggttccctcctgagtaccgaggtccccggtatgaattcatgtcggtcggaatccctcgctccctttgtagacttgaaacgatggatgattgggaggcattggtgctgtggtagggcgaggccgggttgattgccagagaactgatcccttggttcatgcgactgtcgacactgctgcgccgagactcaatggtctcggccacgctcactcgttgggagggagcttcatagttctggttgattgaagggagggtggaattcggctggccgaagttgggagagggttgttgagtgccggcggaggaaggggtggtggattgatcgtggggataaggggagcggtcgacagccggatgtccgcgattcggagagggttgcgacgcggagataaagctgagggagggatagttgttgccggtgccattggtcgctgtagagtaggtagacgatcctacatggtcagcaccgcgccgctcccattccgtactgggcgagggtttcctacttgtgctttgcggcattgaccaattcccggagtcacgctcaattgtgttcagcgaaccattcccgggggatttctcggcgggggccccggtccctggcatatttgcggtgagggttgagatagatgggagagtttgcgtggagcctgcagtcgactgaggccctgagactgcctcccatgggcgatgtgcgacagcaggatccatggcgggagaggcacgatcaggcggggggggggagtgaagaagaatcgaatatcaacccgctctttttcttccacactatcgcatattccaaatcgagagagacgagattgaattcgagaaacgattcaccgtgaaaccgttgtcaaagtttccaggttcgcgcgaggtaaaaggaaggctagatcggaggttagacctgagcggtccctgcaacgccgatcaagcttaccgtgggacggaggagtgaggtattaggatatagagtatatatagtattatgcagtcaaggccgagtcgagagagtgaagtagagggaggtgagtcgagggaaagattaaagaagtagaaaattggagactcgaaagccgaaagcctcgacggtctgaaactcttttttttcttttttaaccttctttttggcatcccctttacgcaagatgaaattaaatagcacggaaatgaaatcgaaaggaaaaagacggaaataaaagaaataaaagaaaagaaatgcaaagaatgcgagtactggtattaccgccaaggccctactgcaactgtgtgtgccacgaggctgaccctggggagtaaggactaggctatacttggcttgttattgtattagcacttgagttagattatattactgttattaaccctaactactctcttatacatactcaaatatagttacattcctgaatagattcctggaaaaagcaaggagaaacacgtttacacggagtcttaacgtcatttagcaatagaatataaaacataaaatagagtagaaaatagaacaaaacacaaaacacaaaacacaatatacagactagaatatagaatactattacaataccttcacgtggtcccttgcagtctcctacttattgcccagtcaagctgcattcgcgaccggggctcactgcacacacccgggagattagtactgtaaggtcagtctgtataaacaaaccatgttgacgttggacacatggcagaggatgcagggttgatcggcagtctcgggggcgaatagttacgtttctactttttctactttttctacttctgtttggcgattggaacaaagtactaaagttgtctagtacgaatccattgtgctaatccttgtcctccatgtgaagaataacatcttttcttcagtcccacacatggcctcttattcaccgagggttcacatgttctgatctatatcctcatccttatatgttcttatttctatttctatttctataatcataattacaatgtatcgaatacccagctaaaacagatccactccctttctgtttgtaacacctcggacacagacagaaagtgtgtcacagatcacccacgcttccatgagcttgagcttcataccgtactcatgcacccacccgtccctgccgcccaaatcatcacatgttgacctgtcagaggggcctagatgggtagcacagcggactggattatgtcgcgcggctattttcaccaacttcacgggggctgttgagggtaatatcccggttccgacagttcagtgtgacctagagtcttggcgaatatgatggatcgggatctcgatctcgtcgattggtgaagggaggtcgagtcagcaatatgcgatatattaatcatatagtctgatcgattcctttgggaagaggctatttacccgacttcctagtgaatacctgccaggtggcttttgggtgtatcgatttcatactccgtttgatcgggtgttcgtccagaaatagaccagccccaaccgtttgtaacctgtaaacctataaaatacactattgaaacgattgaatcaattgaatcaactccaaactccaatcccgtgcatcggcccaatggacaccgccacactgtggctgcaataacacgtcgtccttacccacatgctctgcactacctaactatgtatgtagaagtaatttaggcagcacagattcaatacaataaccatatgcatgtcaactaccactgtctatcatcttccccttccagcatgccacatggcaccatcgtcgccttgcagaatgtctcgatcgccacccgatctacggcacattcctcgaacctctgacaccgtagcacttctccatacttgacgataggacacagcttatccaaggctccaagctcaatcttgccaaacagctggtctttcggaaaaaaaggtccaaaaaaggtccacaaaacggcccatcggcaacgggaattctcagtacgactctatctctacaacgttgtacaccctatcaagggatggggtcactatagagttcactatgtcaatagtgcgtggctcatgcgaatgcctcctctcatggcttgcccatggctcgcccatggcaaacccccatgctctcccatcccatctgctcggagcccatggcaatacaccgtggcccttgcccattcctgcctccacgccttttcggtcgtggtcatgggccgtgccttgctgccctttcccaatagtctgtatggacgggtcgtaccgtccaggggtgtaggtactttttcttttcccttccttttcctttgcctttcctcttgcctccaattcccacttcagcttatcccctcgtatggcagtacccctttgtgcaataatggactgtaatgaataatgccccagtcattcgaaagtctcaagcatgtatgtaatgccatcccgcgcatgcgtctgcactaccacctcccactagctacacatatacaacgtagatcgtacatacattgcacatacctgtctatttgcatatgtacgtctgaagtactctttcctcttcctatgttgtatgttgtagacagcctccccactcaaactcctgccgacgatcctcacaccggctcccgttccccgaagctggggagcgcacagccaaagcttagaggttacatgcagacaaggctggcagatcataccgggatttccaaattagaatgtgagcacagatgcaattattcaattatcgtccagcatatccaccacgaccagaaacctcccgtcttgtccacccgtaacttccgcgtgccgccgcccaaccacctccgtcgtacaatgatttcgtacccacctgcacactaggtaggagtgttgttggctattctgctgaaacagagacaatattggcgctcggctttgaaatgtttggatccacttgtgactgaaataacaatggctagggtggttggatttgcctgtccttctgctcgtataaaatatcctctttcctttccctacgcatgatactaccggaatccactcgggtcttcacatgactggaatctcaagcctgacttccaccactcttcacaattgtccgcctccctagactcttattctgaagggcgagattcctcgcctcggcttcgatgtcatccacactccgagtgagcataatatatccctcgtcgtcgagtgcaaagagggcttccttcagccacacccggcaggtgattctctcgcggaatcgcactgaatccacgattgggatttggcgcaggcggtcgaggaagggcatgtggagggtaggattcaatactcctattttgagggctacgaggagtgcttggtcgtagatgacgctctcattgggcagatgttcgaagcgccaggtgcttgtgtcgatgtcgtttagtagatggtagacagagcctaattttggactctggtgtagatagaggctccagtggaatgtgtagctcttgtcgccgcggttagataataggatgtagaggccgtcgacttcgaaggggagctgtggtgtgtctatgttggactggcggcttttctctgatgttgacatattggatgcttatgaagggaagacacaacatgacttgtatgagcttgtcttaatcactttcttgttcgtgtcgtgacacttgttctacataaaccgcctaatccgaccagttcattggtttggtccaatgttcagtgtttcgcgcttaaaattgggtcaatgactagatgagcgccacagcagcctaagtaacagatcaattggagaaattacaggaactaaaatacaacgccattgctacctaaccccaactaatcccaacgttggtccctcaggctctcaggtgtcgatggatccatgacccctcactttccccaacatcggcccatcccgagtggaattgaacatcagacatatcatcgaggacaaatacaacagttaagatcgacgcgatctggcttaatccaccaggcctcaaatgatcaccactggcgaagctgagatgaggtcactaatctgcaatatgctgctactacactgctttatgctagatcagaaagtcccccccgtatccatccaacaattccttgatgatcccaccatccgtactccatatcttcacccgatacccaggcatgattggcagatcattccacgatctccctctccttgaaatcatcgtggcacaccacaccccttgcctgccacaaaccccactggattcatcctgttctcggttcagatgctgtcgcgtgtcgaatgtcagaacgccccgtagcaaaagggttgcactcaatacatagtcctggtggagccagtatttgccaaacatgtcttgtcttgcatgttgagaattccacggggaatcgtcgccgcttcccggcttccctccttactggatgtggatgtgtaaatgtaaatgtaaatgtaaatgtaaatgtatgttcggcgccatgtgtagcgtagctctcgcttttcctctgaggtacggagtacatacatgcatcgtacatgtgcactacgacataatgctgtcgatcatccacttgtgcatattttgtaggttgcttggatttacatttaggtacatgtttttttggtcgattccccccacttccaagattgtatcgattcggtagtttacacccctgtatcattcgaaatggtcgtgatagcccttaattaacactcaattcttcccttgctgtgtctcagatcgtgtcgccgcccgaggtccattgatcccgcccatgtgcttgtgcttgtttcagttcgcgcctctcgggatcgccccgcgtgtcttgtttactttgttatgggtttcaattgccgctgtggatgatgtcagtggactctagaatttgaggtcaagattggaacttgctaggcgctggtgcggagattgtcttgatgcattggtatattctagtctggttgtattttgaatgttgaattcaacgaattagttgaaaatgcgaatatgtatagcgagaatattggtccgacaatatctgcaagactgtaaacagttttaaatgttcaattgtcccattggacggtattttcgaaatcatccgcgatccgtatgagaaatatatctacggagtacgagaatccagcgtgattcgccaacatcacaatgagcattcttgctttgcttattacattagtcttctacttgtactccatgattttcacacgaagttttcttacatctcgcccgtgctgtcctccactataaatctacggagaaagtgggtttgcgggatccatcccgcgacgcgaaggctcattacaacttagcagaggaaaggaagaggtaaggaaagaacacgccgaatcgtacggttagctttgtcgtacatctacacgttggattgagctgtgaatgaaagctctattcaaattaaagcctttagggtccgtttgtcaatgatggctaagagttaaataggtctagaccgactcgtgtcatggtggacaatggacaatggacaatgtgattcctcttgaacttttaagctaacaaccaaccttgaggatatgttgcaactgacctttttatgccatagcctcaatctgcagttttaatgatgattcgacgcgcaataaattgagatagatgtatggctttatataattgttgatgctgaacctttgccagggctgagatgctgaagagaagtgtaaatcagaaggaatacagagttcatggtcagctacttcgcaggtaaacttgatataatccctgttatgtgatatgacatacaacttgttctctcttcgtttgtttaagagaacaaggaccagcaagaccgtaggctctctaacctctgcggttgtcaagggatttacatatctccaagagaaacatatccaaaccagaaccatcctaatataatccggaaatatcatcaagtcaattcaagtcgtatatgcgccatatataatatctacaattttttcacatgtatggatgcagccatgctcatgatttactcttcatcatcctcatcctcatcctcatcctcatcctcattatcatcttcttcttcatcatcattctcctcaaactcaacgccaatctcacccgtgatatcccaccggtcacccttagccgcagcactgacatacttgacgaacttgagagtgccgctatcccgcagcacgatgctgagtcggttccatcccgcttgcgtgctgaacagaatgccatcgtcctcatctgcacctgctgaccggtaaatagccgggtcggccttggtcttcttccgacccaggacttggtcggcgttctcctcatcctcctcctcttcatcttcatcctcatcaccagccatgtaaatctcgtacccacctagtgcgggaccttccacagcgtcgtcggttgttttttccttcggcttggatgtcttagcagacgagccattggcttctccatcctcgtcctcatcctcatcatcgtcttcctcttcctgcttctcccatccggtggtcggggtaagacagagcgagaactccagtcgaggctcttcgccctcatacgcactggcaagagtatagtccttaccgcgacggaaccgtctagcaagtaaattgtggctcgtgagatggtccacaccagtaacaagcccaagccacttccggaaaggctgtgacgggaacagcacgttcaacagctcctggatcgggttatcggtacccttctctccggaagcatgctggtacaaataccggtgcttgtgtggaggccgagcaaccgtccacccgcgctgtgtctggatctcatctgcagaatcaggaagaggctgtctctcctgctcctcgatgtacgcgctcacgcgcgatccaaatttatcgcctaggaaccgttctaggctgagcgaggactcggctgagaacgcgtctgacatctcctcggcaatatcgggcgtcaggtacgaaggcgcaatgtactgaagtaggaaggccaagtcgctctctgtgaactcgccctcggtctgctcttccactttgcccttgcccttgccttcgacttcgggggtttcccaggatactggctgtggctgcggcaggtcgtagatatcgccgcggccctgcagctgcgccagactgctgcgctcggcgagtttctcttccagtccttcctcgtagccgtcttcgccttcttgtgggatgtggaaccagccgctgatagccatgcgcacgcgcttcttggtcttgtcttcgtcgtcacgtggatagtacacttcctcgacatcgtggaagctctcgcccggttggacggtgaagaagctcagttggttgaaggcgggtggaatggagaggctgtagtccgggctgggaattttaacgtcctcccctttggcgtccttcttggtcgttgtcgggaacaagcgcagggcaccgccccactcggcttgccagggtgtgtcggggtcggtcaggtagaggatgtagctgactcggcggctgccgatgacatcgtcgtggcagagaaggtggcagccctcggtgtagacgttgatggccatgtcggtcttttgcccgcttagcttgccggagccagtcacggacgacaggtactcgcggaaccgtgctgagtaaatggcatcgcgcagcttcagtagtgacggcagtttcgagagggaggagtcatccagtccatcgaggttggcgagatcgccagactggaagatcttgtagatgtctgtttccttctcggtgaaggacacttgcgtttcgatctcattgcggacggagcgaagcagagtgggctcaatcagagggtgaatgacgccatgaaggtagctagagattgagccatgttagcttttgccattggaatattctgctgtatatacatacggagaagatttggcgtattcactggtgtacttctgctgctctgcagtgtcgaacaggccgtcgcggaagcgggcagcagcctcctcgctggagagggcccgtttcttggacttgggcatggaattgccatcgagagaggcccttgcgtctgtcttgcgcttcatttttgaggtttgcagaggaatgggagcttcaacagcaagtggcctgatgtttcatagatttttccgggcggtgagggggcgatgaggcggtcactgtgtttgtgttggatctccatgaagatcgcagttcacttctattgttgagtctattatcatttatacaatgtatggtacgtatctgatataattgtagtaaaatctcaatcagtattgcgttaagcgactgtattctaggaggcctggtctcttcgtagatgagtggcgcatagccgatgtccttgtctttctaataaaatagttctgcacgtcagtctttcctttctcctccttatgacctgaaagagcaagttcctcatacccaccgtcttcgtttcgatcgaagccataacagaacacatgtgattgcgccaaatccaggcaccggtgtcgtcataacccgccttatcaccgcaaagacctcgattgtccccccacttaaccccaacctgcttgattcttcaactctgtcgaatctcattatgcagcaaccaggggctgaagccccgatcccagatcagccgggaactccacctcgcccgccctactccccggtaacgcccgtgtttgctcatctcgtgccagtcgcctccaacgagccatcgatcgtcccgccacccgcatctccctctccaacatcacacctccctccacaatatggcaactattcaaatccccctcctccgcccaatccacccgtcttcaagccgcaaccacccccaatccctatctccgagagcgagaatccagatgccatcgcgctccgttcggccatctcgattctgcaaatgcagaagcagcaaagtttgcgcgacatccaggcattggatcgcatgaaagaggccgccgctgctgatccagaggggtttgcgcacgagctcgcagcaggtcggctgaagacccaggaccacggcgctgtgattcagttctcggaggacgatgcggacgacgaagagaatgaagacggttcaaaacgcacgaatccagacggctcaccagcttcgaatttcggccatatccctgttccgcagaatatcgtccgtatgcccccaatcaactgggctaagtatcaggttgttggagagccgcttgatcgcatgcacgaggagcagttacaccgaccgagctctggggagcctcgacgaggacgcgcgccggagcatgtcctggcatcgccgtatcggccgtttgtagatcacttggagggaccgtcgagactcggccgtcctaacaaggcgaagaagacttgaacacgccaacggttctgatgataatggatatgggattatggacttttacgaagttatgtactttaagattatgaacagagctggacttgtgttttcttgactatttaggtttcttggtaagttggcgttttgtcttgtgcactttcttgataaaaaagacagaaaggaaacatacatgatttatctatgccttgaaagtgtcaaggttctaaatttgttgtacaatatatcatataatcaaaagcagatgctgcaattatatacaaatccttatttcggattaaggagatgaccttccgaagaacaaccatagcttatcccatggtgagactcttctgcaaatgttcaggcaaagcaaacagagtttcttcaggcaaacaacccttggcctcatcaaccttcccatccttaagataaccgtcgatcagcctcatagtagcagtcacgtccgtaatcgacacaatccactcatcaatatatcgcccgacagcctccccactcaacccaacctgaatactccgataatctaaagaccgcagaaagagatcccgctcgggatcccactgaacgcgcaccgggctggcacgcagtttcttctgccattcctcctggcttgtctcactaggcgtgtagtgactcaaacaggaatggcgcaatgcccattcgaaaccttcgtgggtaatctctatcgctaggacacgttcctgtcgggctttggttgcccagcctgatcggtatgccatccataggaaagagggcttgatccatgtcattctctcccgtgaaaatggtgggacgaatgtttgggctttgagtgctggctcggctatctcgggggaatatgcttggtacactgtgattgtatttgcggtttgttttgctcggatagccttgtagttatttgagggcattttgagatgtgtggacaagtgttgttgaagagcggagatggatagataatattcatttgcgggaataggaatgatgggacattatcgtaaatcccactgtaagctcggaaattggacttcggcttttaagtgcctacgatatatcttggccctaagcctcatagtacacaccaagcctaatcgggactccgctatactccatcaccggatcagctgataaacccaattgaaaggatagtcttccttcatacctgaggccattgctgatgcctaaggactctttgtatatgtagtataggaatttccgctgacagagtagccgtcagtgcaaagcatcgagagttggactatggtgcggtgccaagcacagggaggtcttttatctgcaacaacacggctggcaactataaaaatttaagtttaagatgcgctggcagtcgtgagaaaatatgagaacatggagaccactgataagttcagtacagcgtctcgtgaataaagagcccttacttgcatcggttcgatactacagcaatgtctgcaaggaactctttacgaagttatcagacatagcttcgaataaaaatatcatagtatggaaaacactaaattcaatgatggtcttctgacaagaaaagctatgcacaagactttggcctagtcctgagctaggagggcctcctcaggtgaagaaaaaaaccccccgaggacacatttgtcgtgcgttcacttcttgtgtggacgctttctaatcacccgatcgattcctcccattgcctcccagtaacgtgcatgagcctcctgggtacgcttcctgttggtctcggcatcgtcctgggacatgtaagaggtgtcgtcaacctcgaagggcgatgcatccagagcttggttggtgcctagcttttcgacgatcccagagtctacaagaagccgggtgttctccctaatgcgttgatcggcactgggatcatcaggcttgcaggctgagagaatatggttctcacaagccgcattcacaggcggctgtgcgagatggatctagattacttgggtcagtaaaggatcggggagtagtggtctggaataagtatcttacactggggccaccagagggcgtgacaggcctggatgtcaagatgcttccgccgaggggaatgttgaagctggtgttggccaggatgatggcatcggcgttcccacaatgctgatagtgatattgattcatggaccgtctttgggcctcagggacatggggatgattctccatctcgataggtggtggaatgacttgatgatgttagcatggatgggtcaaggtgaagatgagattaaagaagaatatactcaccagggggtggttattttggtcttggggatgaaggaacagagacaagatccttgttctggcaaggctgagggcgttttgcttgacttcttagaagaagaggccggtattttgaaagattgaaagagatgaaagtgtcaagcaatggatggtacaatatgaatgtcttgagaagttgaccgtgaggcatgcagttgtgatgagcaagtcagagaacatggagcggttgatgctgtctgtgtcaatcgaaatgtcaatttattactctcgaatagaaggagcgatagccatatctactagtcgctatactaacaggaaggacaacacgaaatcttagaaatacaggattcaagattcaggtcgagatctcagggtatcgtcattataatatgataacatgaaagctgcaagatgagcttgaataaatgcttttgtagtggtttcatattagccatgtacaaccatgagccggaaagcaaatagaacgctagattacctgctggttggtagatcaatacgggaggaatccttctttaattcagatacatgcacattgttcttctcagtgtgttggtcatggtacattttgttgctataactagcctggcaggtttggtccaaatgctgtgaaaacatctagccaatctattccgtgcttgggctaagagctttatttccagcctcttcggaaatatggcactgacacaataggatgaggcattgttctaaatgcttgaaccaagaattgagtatatgtacacattctggtataatatgaacaaaggaatccaagagcttcgaggttgcacccactcaaagcttcgctttcccattcttctcaaactgctgtacagcctctagccctctttgccgaacagcttgattcttctcttcgacattcttccgccactgcaagtttccagcatgatcatccaagccgtttaagatgccacaatacatctcctctttcatggtaccgtagataccggtggcagctttagtctggagcttgcgggtctggatcagcgcaagcgcttcctcagctccaccaacggcatcaacgataccagcctcaagcgcatttcgtccaccaaagcggtgagcttcgagaaccacagtccggaaaacgactggcgtcagcttctcgcggaatatagacatcatgggtgtctggagcgggacgccaaattccagctcattgatacagaggaaaccacggtctgggttcatgactcggtagtcatgatacatggccaacatgaagccggcagcaaaagcgtgtccatttagtagacacacggttggcatggggtatctagggaggatattagtatcttaaatatacataactcgacttgagcctcggactgatcatttaagaaaaaaacatacgtcaggaagcgtcggaacaatcgccagatccagttctcgcagaaccctttggttttcttgacaatgtcgagatccagcccattgctgtagaacttggcaattccactagtcgtgactaagacacctttcgggtagcggtgctcgacaatgtcgagagcgagcagcagagcatcaataaaaatgggtgtcagttggttgtccgggggtgaactaaaggtgagcacgtagatggtctcatgctctttcgctgtgctagggtttgtgcagacgatcgagcctccagtagagctgatcgggacggtgaaaagagtcgtcatgatgggaatatttggtgtatggaagttgttgaggaaacatagcttgttcaaatagatcgattatttgaatactaatcagacctcggcaccatcacatgccgcaatgatgtcatcacgtgattcccgaagccattcaaaggaaaacacatcgctcgtgatatttacagctcagaagatcttcagcctacacgtaatgaaccggaattcacgcttctctcgataggaaattgttcctaccggggggcaatattttatttgtccgagctcgcaatagaacatccatgccaacccaaatacgaacttgtcaagctcctgatacgccgtttcccacattgtcattgacacatttctcttggagtcggcatgttcagggtcaaccttagatcattagcgcctcttctgaacatccttctcatccctacgtgagtttcttttcagcaggggtgacggcctgcgcgaggaaatgataagcggatccaccatcccggccgcttcggggtaggtggttggaagagaactgcttcttccctcaggtgaccatgtccttacccttgacgatagccttgaatgcggcaatggcgtcgtctagggatacgacgtctgtctcaactcgaagattcaacaaccttggaaaaagcttctagatgtgcacaagtagcggtcagttatattgtgtaacataggatagctattgaaacaaaccagaatccgatcagtaagatatccccaatggtaaggaaatagatagataggcccatgccaacgttcgatttaaagtgtccggagatttggcatgctcaaatccggggcacagatactctcttcggtgctttagcgcgaaagaccagagtaaggtacaaagtgtgtaacttctggaagaccaaattttccagagctggtttgtaccactgcttcagtcttctggctatatgttttcatagttgcagctttcacaagaccggcatatatctagcggcgctctagggagaagtttatcatgaactcgtccaggtgcatcccacttgatatttccatggagctccagaatatacgtatcgtgacctcggggcgacgaactccacgtgtccgttgagtctcccctgaactggcctccgccatgccctcgcagaagatccccagatggggtggggagggcgaaaggcctggggagagtgggcggttaggggcccttttggcagaggcatctttgcctagagagacactcttggtaaatatgggtaagaattcccacaagcacttctcgtttactcaccctccttgccccagagcccccaatgcgaagtcttcttctttttctccaccctcttctctatcttcgcgaccagaaggcggtacttctccttttggcgtacttttttttggccttgcggtactcctccgtcatcaccctccgtgggtcctccggtctcacttgtctagcatgatgcctatgcatatatctattagaaggatgcatacagcgagtatcattgccgaacgttccatgccaccggtgttcacaatgaagttagtcgcatttggcggtttcgacctgacttgcagacattcgaattcgaatagaacttgaaggctgcctgtgatcttcacattttgggacaggatttcggacgatctccatattttggtaaagaataggagtttggtcggccccgatgagtcgcgccgccttgcttgcctcccaggtgtcttccgtgatgtcgtcgggacgatccatgatttgctttgatctgtctccgctcctcgggtagaattccgaaaaattggctaaggggcttaagtgaacaccgttctctgtgtaagagattgttggatccgttgggctgcaccgtactgtcaactcgtacaatcttatgattgttgtagtccagctgtaaggaattgttattggtcgccgtacataggccggctgggcctacgacttcgccgaactggaaaccgcggtatgtcggtgcctttgtctttgtggattttaggtgcatcagttaggaaatgagccatgtggccgcgataaaagtattgctggccgtgtacctgtctgacttcaatgatggtgtgtacgcgagacatcagcatttcctcgacctgggttagctctggtagaaacgtagggacatccccagggtccatattattctagacaccgaataagtaaacgcgatcagcgggtttcttgatcatcgctgctttatccttcttgcgacaacgctggcaaacgcccaccgaagggcctcggactgagagctggagatcgaattcacagtgaaaattatatgacctgtctgcattttgcaagtggcaagaactgcaagagtccattccttactcgaccatgtagctatgcccgggatcgcaccggtccttttggtgaaatcgcaggcgatgcaggcgatgcaggcgatctaattgagaccgcgtcggaagacggtaggctggcaacgaacttaatacagagcctgtggaacgggattggcggaccgattatagactgtagagagccgtacggtctatgccgtctcgtgctattctggagacattccaggcaattttggtgtattgtttcaggagccgcattcgcttgaattgaaacacctggctcatgatattgtccccgattcgctcacgaaagacgtacttgggatcaagatcgggttcattgggattccaacctttttgacgtatccgggagattgacattggattcgttgccggctttttccatcttgtctgccgttttggcaattttggcggtgaaatttggccctcgtagaattctttgaaatcttatgcatcttatgcaagtgcagcaggatctaattccgggccgaaggagtagaaccggccttcgtctttcgcatggaggtggtgacatagcgaccttctcgcttgtgagtagcggctcaccgaggatgatccatttcgaggaaagagatagggaaagtggggttaatttgcaggagggagagaagcaaaccttgggagatatacctctggagaggtataatgcctggggcactaatattgaggcctgaggttaaacgcaactccactgccggttgcgcggagttggtccagtacttcttcttgcagtaaacacgggggaaaattctccgaggagggctaagtggaaaagcccttgccgtgtagtgatagtccttccttggggttcatacacatcgttgaacaagaccgtaagagagagttggagagtccaacctttctgaggaatattgtttcctcatatgtggatagaaaggcatgtcgaacattcagttcctgcatgtagcgggcaacctgccctgtaatataatatgaatacaaaaagtgtgaggtatgaggtgtggaatggaaacatgtttgaagtcaggtcatggggtatatatctgtactttaggttgccatgagaaactgaattgaagaaaaccttcctggtcattttgattgtcttttcggatgtcttctcagatatatatatcctgcgaaaagcatagactgtacacgtgattcttctttataaccttcaattggtaggcaaaaaatttttatattaagactatactgcaggcaaaatgtgatataatgccatactcctgggttcaaaggcgacggctttataaatcgaagcaaaaatgagtttaactctcatactatcacttggtagtgttgtgtaagcctttattagacttccctgctgtcttacctctctttcactcggaagtcagatctcagtttcggatatcttgtcacagacaaaagaaacaacaaggcaaattgattcattgaggggtcgagatctcgagcacgtggaaataataaagaaaaatctaaacaatgagcttcaatcgctttgagtgtctctcatagcgaggtagcatctttgaagtgtacattaggcaatgataagtctcttggtcccacataattttagatcttttcatctaattatatatttgactggacaatctctcttgatactcagatctaacgactgacatacatccacaacaatgtccccgaaacccgtgtttggcccgggccttgaagtggactacaccaacatagtccaaaccgtggagacacagattgaaactctgacatacaaggcatggcgacgccatgaagtgattgagaaactcgaaagcctgtgtcgggagctggcattccaagccacctgcgatgaacgcaagcctcgcagccatcttcttgggtacgcccaattccaacgtttttctatgacgcttagactttatttacccgaggcaatcctagtcctcacgagtgactggaccagttaccagataagtagccgggccttcgactgggtgcgagaggatgagatggaatatacggcagcttgtgtcctgaaggaggcacttcttgccgcacaatctactgactggtatctttgacatggattgtccggagtattgatttctcgatggcatattggcagaccctgattcactgcttagttattaagcagttctgacaaattcatctcaatcggcatttttcctgactcgtaataggtggtagcgcccgaaaatctctatcggggggtcgaagagaataaaggggtaggagacgaagtgtatatggcaatgtcggtgagggttgaagtttctgacttggccaaacttgaattcccagaagacaccggtatccgaaaagcctaatctgtcggaatagatatagccctctgccggggcgtagttgacaatttcaaccgacttggcatatatcctgaactgcctttgagtatcagtctctccaccggctcagtcggtcatgccgttgaattttctcggattgtctcctgttcagatctaaggtcgaacggtatcggcctctgttggaagagagtgtgacctttcgcatagtcgactgtccggacaacggtcaatcgctcagtgcttatgtattgtagtcgtcgattgaaattgtcgggcactatcttgcttgtggatcgtgaactcagcactaccagacccagtgaccaatgtctgtccaatcattcaaaaccgaagtgcgtcaaatcgtggttgatatgacctttggtgttacccctgttagacgtaggttttgtcgaaggcattgcaacctggggctttcgaagcgagagcgaggaagaataaaacaagagctagaaaatataagagtcagctgtttatatctgtgaagatgtcccaaagtagtaagagttggtgcgaacactgcgctcatgcgtaaggatcaggtcttccctcaccattttcggtcaaataagaagttagatataaccattagaagaaaatatagtaaataaaagacagtatgattgaactcctataaaagtgttaagtggcgggattgtgtctatccatgattccatacactgtgcggaaagatagggctagcggggcctcaacatagagcgagtccaactactttggcaaggagatcatttgtctgccatttcctgcagtaatgttcaagcaaaaaaaagctccatagactaactgcagatggaccagggaaatgaagtgcttgtcaaagtagttgatctcgatctaagttgattccccattcgtactaggacggtcctatattgcaataatgttagaatagaataatattaatagctccgatcaccttcatttccgaatctaagctttcttagcaaaagagaaaataactaaagaggaagccgaagaggcgagctggtttttaaatactctgccaaagggcttcgtcaccttgacaataccaatccaccgggctttttccattgtttttcttttcttcctttcgccttccgtttccctcttgtgtccactttttaatttcctcgccttcctcgttatcaggcaatagccaatggtcggatattgttcctgatctggttctcggagcggatgctggcgggctaactaaagtagcgtagccaatcggcatcgagagaagagccgggtaattacgctgcctgtgggtctgcaacagtcgcctaacccgatgcggcagtgcaatttgcgctaaggagctagctagtatatagcgtcgagtcaagcttcgcaaaacctttgcctcggactcggagatagccttagtctctccttgagtctccatagcttcggtctcaactggaacgatttgcctagcactttcggcgctaggctggactaagtatgggcaaggttctaattacagcgcgaagtggtgattcctttagcctacgctctcgcttattgacctccttaatcttgatttttcgagcagtcatggcgagtttttcattaaacttatatccactggctctctgatctccttttgtggatgttctttttagaggctaattctcacacatccatcccctcccgcgatcgtgatacttgctttacattgcgatataaagcgacattgtgcgcgtgctaggaccggaccgagcatactgcgttaacgaagacctccgacatcatgagatcctggttctcgttcctccttttgtccctgacgacgattgtcggggtcaccaatgccaccaccgaatacacggggacaacctgcaaccccctcaacaagacatgtgatgcggatccggccctcggaacagagcacacgtggctgttcaactcaactctcgacagcgatctctgggacatgcgcaccggtactctggactatacatccgaaggagccgactttatcatcaaaaccgagaacgcgtcgacgctcctcgtgtccaacttctatattttcttcggcgtgatggaagcgcacgtcaagatggccaagggggccggtattgtcagcagtgtgatcctgcaatcggacgatctcgacgagatcgactgggagtgggttggatataacacgagtggagtgcagtccgatttcttcggcaaggggaataccaccacgagtgataggggcggatatcatgcggttgcaaatgccgataccgagttccacaactatacctcgtactgggatcgagaccgcatggaatggtggattgacggtgacttggtgcggacagtgaactattccgagccgttgactgtctacggtaaaaactacccgcaaacaccgtgtcaggtcaaggttagcaactggccagttggagtcaagggacagtcgcaaggcaatctggaatggggtggtggtttggttgactgggacgatgttccgttcacgatgacggtatcgaagatccgcgttcaagacttctccactggaaaggagtacaaatacaacggaaccacgggcacctatggcagtatcgaggttgtcaggtgagttttgttctgaatcggttattcaaagaatttcggactaacttcaactcgcagtggaaactcaactgccgtgacagtaatcaacaagaaaccagagaagaccctcgcccagaaatgggctgatcttggcaatggagcgcatatcggtgtgtacgtcggtgcagctgtggctggtgcgcttatgattgccggattcggattctggtgtatgaagcagcgtcggagcggccgtctacaacgcgctttgaacgatgacgaacacaccgccgagctcacgacgttggagcagtcaaagttgagatggaggcaaagtgagttgcgtagcaagggcagctaccagccggtaccttaagggggtcagttggattgtatactatgtttcggtcatgtttattaatttaatgtagcacattgttatatatcccgtttatttagagagttcaaagccggagttcgtcgtcggtcacagcatagcatattatgtgtttgctttatcttaggtttgttcgctataaactcgaggaacttagttcgtagtagataccgatgaatcgctcggataccagacaaataaattggcacaggatagatttccggaatgcttggatgcaaaccgaagggaaaacaagccagatagttgagtcagtaacggatgtcaatccgcctaaacgaaatctggtcattggtaccccagaacagatccgatccacttgcactcgcccactcacacctatctcatcagataccatgggatgtattgggatagtatggtgactggtcaaaagagatttgtctgcttaggagaatgaagtggggcgacgatcatctcgagtcatgaggacaggctttgattgtcctagcagatggtggggccgtgtgttcttcgaatggggagctggggagcagatgtaatccggactcaagaactgaccgggagggtgacaggtcgggttggtctggggacacttgtgcagtactttggtggttgaaatagggaagtgcagacatgaaagagaatctgaccggaagtgacatgtcggctcaggtctgggcacattcgtgacgtagaggttcaactttgctactctttcaaaagtcaagcaattcatgacgcgtttggcgccattcacgccgccatcgcttcgtcgtcagaaagaatactcggtgcgctgctcacacctgaactgtcgctgtccgtcacctctgaagcccgggcacgaacctgcaaaccccagtcttggatgctggggacaccaccctcaatgacgacagggtgttcctcagcactctttcctagcacagttccagcatagcgcgactcctcgccagtcttactgtgtttcttcttcaatgcagtcaggtaatcctccttctcgacggcgtcagggtccaccatgtcaccctcgctgggcacaaagccggcaacacgtcggatttcacggtgggcggggccggtgatccagccgaggaaggcatcaagaccgcgcatatcttcttttccctgccattcctcttcccattcgcgtagttgtggtcgtatggcgcctgcgtcctgcagagcttggtagatgtcttcgaggtcgggaactgggtcgtatgggtgcgcatttgcggcatgctcggcagcagctgacgcgagaataatcagatatcgcccagtcaggtcctggatagactccaagactgaggggcgtgttgagtggaagccttgagcacggaggatttggatgattggagggcggaggagagcgttatgaaggttcgggcccgacattttgcagaatatatcggcgaagaagacagagagagtagagggacgtgaaatgaaatgtagaaaaagaaaaaagaggagtgttgaagcgtacaggcgactgagtgcgccatcggggcataaccctctcattggttaatattgccggcagtatttaacaagtacagtagctacgtcaaaagtgtagtacatcaacttgtctaccatgtatatactctccaattgtatttgatactatgcaactgtatgctgtgtagaaccagtttttttctcttcttcttttcttaacccacataatggtagtatcaaaatctttcagaaagtagtataagatataccaaaaaagacatcaaaaagacaatacataatacggagttgtaatgccatacatcgcatactaattacagccaacactagacatacctaaagtattttagcaggttgtgtcgctagatgaagattgtaaagtgatgtacaacgcgtacgacataaggtgtcccatagaatcaaaagatatatcggaatgaaaagagggatgagttctttataagcttcaagatcaaatagttacaccattatgaagtacaactaactactccgtataggtataaaattaggatacaggcctcgggaaggcggtgatttggggcggtgaggtggtatccaagagagctatcgatgccagtagcatacttagtcgcccatagaagtgtcgaagagacggagaggcgctgtgacagggttaagtgtcaagagaattgtgaaagcccatatctgatgtgccaggctttccatgccgacacgagtcatgacaaaatcactcttattctgcggtctgggctggcaatgtatgtcttcgaagggaatacagatgctaccttgaatatggtcacagcctggcgccggatccttggtgatctccatattctgcaccaggaagggaatcccatgctcgttgcttttccattgcgcaatcgtgatttttccctgcagtacttcgatactgagtacaacgttcacttctccgttgctttggttgagccaaaacatcatgtcgtcctcgagctttgttggtatctcctcgcatgctacctcaactgccatgctaggccatttggtgccaaaaatgagtcggcctccaggaacaatcggccctcttgatccgccctgaattgcctcggactgatgttgaacccataggaaggagcatataatctttctccactatttaattccaacattcgaccatgccgaagaaagaaccgattgccactgaatgtgctccagtctcgagtctgataagagcatggccaatggaagggtcgtagctctcgcatgattgtgcgaacagattttcttcaacattcatattatcaaggaaggaacgctcatccataataaaaatagtataagggttagataactctgtatcctgtctatgtcgctccagttcctggtctagaatttgaagagcatcctcaattcccttaaactcatattttggggtcgtagaaggaaggccgtgttcaaacatgatggatgtgaaatgtgagagaaatttcaatggattgtaagagaagttatagtccttcagacgccaaaatgacacaatagttagttagttaactaggatggacatggtgcctattatgtaaatgtgcggtaaccgccccggtggaacctcacctcctcacttcctccactcaccttactcaccttacccttgctaccaggtatcatcatattgcgactatgccgcctttaaaaatcaaattctccaggaggccagatccgccagaagaaccagcgcctatacctgcgcccgtgcctgcacctgcgcctgcacctgcgcctgctcccccagccgaaactccccaagccccccgcaagatcacactcaagatcgcacgaaaaccacaacctgagagtgaagaaaaaccaaagaagaagaagtcaacaaagaagcgaccagccgaaactgccgcacttcctgagcttgagcacgaacccgaaccggagacgagccagcaaatccccaagcggataaagctgatcccatccaagaagcctgctttgcagtcaatccgcatcaaaaataaaggaatcgttcccaaccgaccagtaggtgttgggtatgactccgaagcctcggacaccgaacttgatccgtccatcgaagaacaattcatcttacggatgctccccggagaggactgcgatattataaggaaagtaatcaacgacaggacattcaagaatggcgacgtcgggatcaaacccctcacacgggagggccggcgctctatcgtgaatgttcggggccaccaatatgcggcagctctcgtggatctaccctgcatcatcgagggcatgaagagctgggaccgacgaggctggtacaagtcagcagatatctgtcaaatgctcttagttctgggacgcgtcaacagtgaccaagaagctatggaatacccactccccccgggcgttgactctcccgatgaaaagacacttcaatacgcacacggtatcgcaccacccctccgttgggttcgcaagcggcgtttccgcgaccgcgtcagcacccgcacgatcgaacaagttgaaaaggccgtggaagaactcatggcccaggacgacaattcgattttccctcccaagttcgagttggtggacagcacatccctgaatcgcgtcgagggcttggtacaatcgggaggctacggggatgaatacgacgatgagcaggatgcatacggtgaagcggaagaagagatgatggacgacttcgaggatgcgcttgctgccgagatggaagcggcattggctgccggggatgatgaggcaccgggagcacccgagcaggcacacactacgtcccagtcgttcacaccagctggaggaccgaccgaacgcggcgacacctctgcagatgagagcaacatatccgacgaggacgaggaagatgagctggatgacgaccaaatcgagcagcaacaacagctccagcagcagcgcgaggaagtcgccgagctggaagctctcatcaaaaccgagaccgcacagtgggagaaggtgcaaaatcatattttgcgcaacaagatgggccgacggatccaggaactaaagaaggacctacaactgaagaaggtctctatgggcatgccagccggggacgatatctgagctcctgtttcacatcctatgtccaatgggattttcggcgttaccatttcataatcatacccagtttgtccgaccgaatgcgagtgcggtctctatgttgatacaagcagccttagctagctcgaaataatgaaagttatgtccaaacattaacaaccagataaatcacgctccttccatcgccactctaagatcgagataggtactttcaatacctatttactccgcacttaccaccggatcaccagtagcctctttaaccgcctcctccacatccaacttctcatcccgttccaacttctctcgcctgacagcctccctctccgcaacctccgcatccgccccaggctcacccggactgctcccaaccctctcaccaagaatgcgatcatgctcagctctcttcgatcccaaattcgccgccagatcatctgcttccccgaaaccaggatggccaggcccacccgcactcccaacagggccagcatgagcaccggcctgcgcgcgctgcatccccatccccttccgctgaactgcgtccgcgatatacccctccgcgggctgctcctcgacgccgtattctaaatcgacgtccggcgcattgtggagttcctgttcgtgttgctggtgctgtgcgctcagacgggctcgtgcttcgtcgcttgagggctgggactctgctgtacgtttaattaccccgatcgtgtcgccgtgttgtcggcttgtttcggtccctgctcgttgctcttgtggcgtgtgtgagacgggattcgaggactgcgcgtaggcggcttgtttggggggttgggcggtttgggcggcggtttgggagcgggtctgcatggtgatacaatgggatctagatttatgtttcggatattggatatggtcaaggggtaagaggttaaggagtatgaagtaagtatagctcaagagctggataaccggctgaagaaagtgacagctgagtacccacttgtgacgtcagcgtcttcgaccaatgagagcgcgtggaagtacaaccctaaggatagtcgcgacaagatttggttggctcaatggttcggagtagtcttgttagatgtcttttgtgtatagatctctttcccctttcttcgtcttaagacagacggtagagaaagtcaaaaaatgcttgatttagtcttccatgtataacttgaatccactctacaacataaggggtaaatcaactgcacaaagtactttgtcctcggcacttctggactaactcaataagtgcgacccagcaaggctaccgaatcaacgacaatcgccttattctgcacagatcgtcgtattgtcccaaactgtcgggactccaagcccccaacacgaacagtatcagtatctcatcccgtctacccccgtccatgtggcgccactaccacctgcttctagactaactccaactgtaatccaagtaattcaactaatcagactaatcagaccgccccggaagtatgtcacccaaccccctaacccacttcgacaccgtccgaggcatgaattggggtgaggggaacattgtgtgacccagtccctccccactcgttttctcgcgatgttcttctcctatctttcacataggctgaacgcagaaccctctcggtatctcactcatggctcagcaactctactatctgccgcgcggctcgcgcatcctggtcaccggcgcgaacggcttcattgggagcaatgtcgttcacagtctgcttgaactaggctacaaggttcgcgggactgtccgcgcaccgaaaccatggctcgatgagatgttccgcgggaagttcgggcgggactcgtatgagtctgttgttcttactaactttgagaacgtggatactcttgttagtgtaatggatggtgtgtctggcgtggcgcatgtggtatgtatttggcagtggaattattcgatgggtatgtgctaatgagacattgcgctgtgtaggcatcagatgttagcttcagtgcgaatccggaagaggttgtgccgtgggtgttgagagctgttcataatgtgctagaggctgcatcgagaaattccgctatccggcgggttgtcatgacctcttctgcggtcacggcgttgtttccggagccgaataaggagggtgttgttgttcgtgagggtgagagaccacttcttagagaagggaatgcaaggatgtattggttaatattgtatctagactcctggaatgacgaggctaccaagctagcctatgattcggatgctccaccacttgtgaagggcctttacacttatgctgcctccaagaccgagggagagaaggcagcgtggagatggatggagaagaacaagccaggcttccaattcaataccgtgttaccggattttaccgtgagttctatgccaggccatcaaacgtatgatattgacttcgattagctcgggagaatcctacatgaacagatccacggctcgacaatgggctgggttactggcctacccaaaggtgacacacgtatttttgagacatttgtgccgcgtaagttgacactgcttgattgttcgatcattgctgatataaaaagaatacttctgcgatgttatcgatattgcgcgtctacatgtggcggccctcctcgacccaaatacagtctcccgtcgactcttcggatttgcagctccgatcaacctcactgatataatctcagtcgttcgaaagctccagcctaataatacattgattcctgaacctcctgttaacgagggccgtgatctgagtgaggtaatcccggctaaggacgcagaaaggctcctacgggaattctgtgggcgaaaagggtggacttcgttggaggatagtattgcccagggacttgaggtatctcgaaggccgttgtgttctttatagcgtcccattgatttcgcaaatacaataagaaatcttcaagttgttgagcagcaatagtgcagaacaggtgacattctcccgagatctcactctgcagtttccgactttccacagactgctggtgccatctttctcgctttcttcgccgtcaaaggtgttgaagtattctcttgagacaatttgtaggcattttggctgcgtgcaacacgcccgactgttgacttcgagagtcctctatcgacactagccgcaatagcagcccagctgggtcgatcatctttcctcaccaagcgcgcagtataacgcgcagtttgatcactcaacttagaagggcgtcttcgtccgggctttgaagacatatctttgcgttcttgaaaacgcgttttcgtacagtaaacagtggatcgcgcgacgcgaagatctttggcaattttgatggctgaattcccattttgaagggctttgataattgctgcacgtgttatttctgataactcgcttggagccggctttttggcttttgttgattgagacgtggtgaagtatcgttgcaaagagacgtaattccaccgtcacctacttgccgacatcctgaccgaagagaatcagttacctcggcaaaccgaacatctacatgtaagaccaaaatgtattcaaaccaggcttgaatatcagtccttcctattagaaaaacaaaaaggcgtggttaaagtgtaataaaccattgtgaatatcggcagatctacccctcaacaagaaccactcccatcaatggcagattccacacctacgctacagcaagctgcggtggtgcaaaacccaggagaaaatgcaactatcactcttcagaatgacatacccgtcgcaagtcctggacaaaatgaagttctcgtcaaattaacttgcaccggcctgtggtaagcgcttacattccgaaatgaattcaccctcgaaaaactaacccataaccatcaaaaaagccgctcagaactccgcgctgttttagcctggggtgcatacaactccatcatcggccacgaaggggtcggaattgtagtaaaagcagggcccgatgtctcggagtcccttctcggtgaacgagtcggcgtcaaatggctctacagtgcatgcaacaaatgctcggtctgcaagcgagggttcccgaactattgcgcacagcagctcaatacaagtcgccatgttccggggacattgcagcagtatgttatcgccgatgcgcggttcctgacattgatccccgggggcgtagccgatgaagttgcagcaccgctactgtgcgctggacttacgatggttggtgctttgtcgaaacttgatcatgagctgcaggtgggtgactttattgttatttcggggtctgggggaggtttgggccatattggggtgcagattgcatccaggatcaaaaatttgcgggttattgcggttgatagcggtgatgataagagagctttgagtttggagtctggggcggaggttttctttgattacaagactgaagatgtggttgctcgagtgcgtgagttcactggggagggtgcgcatgcgacaatcgtcgtgccgggtacgaaggaagcattgcagatggcgcctaacctggtgagaaacatggggtttgttgtgaatgttgggttgccaccgaatgacttggatattcctctttcggctacactttgcacagcgagaggtaagatgacggtggtctcatagtcaatcatatactaactctcacaacgataggtctcacctttatagggtcatctgtgggtacggaggatcaattgaccgacttactgcaagctgcagctgctggaaaaatcgcaccatcgatcgaagtctttgaattctcggacgtgccgactttgatagagaagctgagggatgatggtattatgggacgcgcagtgatcactttgccacagtaacttgacattccatgtttcaattttaagcaaattgacaagagagcaaaggcgagaagagaagggttgttgtattcttattcctggtcacacttctacagctacctagtcatgaaaatatattcccataaagacatcgtagtgttaccagaggtataacgtccctaactaattaacatcttggagtcaggccaggtcattaaagtcttacgttcagtaacgtagctttgtatatataacgaccagatcattcccagttctcctgtcagacaacttgaccacccctgctccgggtgtcaaaacctgaacccaaccaacctacttcttgatgatctggaggaccggtgatgatactggagcaatccaacaatgaattgattccggcagacgttgttctcgtctactggatgatgaaacaattaatctcaatgagtggcttgtatacttgtaaaaataagttctagctcatatccactgagccaacggtcgtcccaaccgtcactacctccattgacggactgccttatgaatctcatgaatttgctttgacctagagaccggtatcctgcccattcatatatgggaatagttgggatgcttgtatatcttcttcgtcggtatagtcatacagagcaggacaccaaatccatggcttggtaaggtgactggcattataggctttgatcatatctgcccgaaagttgtcttgctggcttgtgtcgcgattcccgttgcctgtgcctttgatagccatgcccggggggattatgagctcattgctcataatcttccacctctattccattccaagcttcgatcatgccggtgaaacaaccgatgattgttgcatgtgctttagtctccattctgacgacaagtttgttgatggaaggatcatagagcttgcaggattcattgtgtcatggtgattattccccgtttttgtactttgatgctgagtacaacaccaacttctcagttgcttgcgttcagccaaaagattataacttccacaggttttgcttgtgcttctgaacaggctacctcccttgaaattcttcacggtttgagtctagaatcttggctgtatccatcttctggactgggaagcaattccacgccctgtccggccctccactattatctttcccttgacttgtccgttactttcattaagagaagcctgacatccttctcaagcttcgcccgtgatttaggtgaagatggggagagaagtaagaagtgggaatcaatccgggagggtttatatagctcttcagaggtcatatgaacttgtgctttagtctaacctaccccggccaacgaagttaggtaccgttcgtatgttataccaatacaaaaggtactttcttataccatatatacggcacctaagtaagacttcttgatttttttttggcatgcaatattgactaatggtaaataggcggctaggcctccggatactaaggtaaccttggaagtatcgtagcgaccgccttcgccttccatatcgaatacatacagatatacaaaagaatatgaggaaaaatgggaagaaggattactgcccatggaccacgtgtactgggcgaaattcaaaattcataaataatgagcacaaactgagattatcgttgcccgcgccaacaccaggaaggtgtgctgggcgcttggcagattccttcgaaggacgctatgcaccgcgagagcagtgacatcagctccgatccccgattcctcccctctccaactccgtaattcaccatggtttacgcatttatcctcccaaccgtctcgcctctatcatttcaatcattcatctcctctgccactcatccatccctcccccaatcagccacaacaacccgccatgcactccgcctcgcattgaaggcccacaagcgcctaccccgcggcccgcgccaggatgcccacctacccgccgttctgtccgccttgaacgaatacatccccttcctgttcgcaatctcaaacggactgaatggtcgctctgttacagcgaattcccaagacggctacacgacagggggaacgaatatccgcgccgaagtagtcgacatcacagcccatgcggagatagagtcgacatggagatatacgctgtcatcctcaggcgggttgaatttcgggcccgggggaaataacacaagcggaaacggtatccgcacgcggaatggacgagtctctggccgcggcatccacttcgaattggcgtttacgctcacaacgctcggttacgtactgagtaggatggcgcgcgcaggagtcgtcgctacgttatacgcaccgtctaccccgtccgcggagactcgtacggctgctgtccagactgcgacacggtatctcttacaagctagctcggtgcataatctgctcgcgtcctcgccgactttcaccgcagctactgtgtcgacggtaccggagctcgagtctggtacgcagtctgctttgtcgtctctggccatggcggaggctacattactggctgtccttaaagatgatgcgtatgttgcggcgtgtatccaatcgcgcaatccgaatgataaagagtggatggtccgtgcacctgagataccgaaggtacgcgctctgctatttgcaagactatgtgttcgtgccgcagagtacgccgaacaagcggcggcaggtctaggtgcagttggatctacgtctggtcgtgcaggccgtgtggatgaggatttggtccgctataccggagtcttggctcgcgttgcccgagcacgcgcctgtcgattctttggtgtggatgcggagctatcaggcaaagtcggtgagggtattgcgtggttgcgagctgcacgcactccactgggcctacgtggagcagggtctcaggaagacactactgggtcaggaggctctgcaaagggtggactatcccgtttaaagcgagaatggacagagcggcgtgaggagcgtcgagttactaaggatgctggcggtagtcgcagcgacaaaggtccattggatgcgggagatgatgctggccgtgatgaggagggacgagtcctcgcgatgcttgagacgaattgggtgaaaatgaatgacacagtaagtttgaattctttacgtcactctagcccaagtgagacttaatatgtatgacttcctgacccgatgcagatgaacacgcagatcattccaccatctgcaccattgctctctaatctgccttctgggcgtgatatccactctcccccggcaccataccagcccccttctttagatgacgatcaactcatgcggatgcgtgccccaccagatgagagagatgacgttcaattcggaagtgacgacgatagtgaagacgatgcaggacaacctgatagtcgtgaacctccgggtgcattcccggaccggagtgcgacagtctcgaccgtttattattgaatacggatatataagtacatataagtacatagcatgagatacggtgattataccgaagttagcatttacttggcggtccaaggacaacaggtgcccgctaaggatacattgggatatgaggccgtgtgtgggtctttactacgaccatgaacatcgtagaagaaaaaagaagatcaaacaaagtgatattatgtacagtacagtcggacaagagcatagagggtaatctccagacctcttctgccatcttttcgtctcccctccgacacggacccgatctaggtggctataagatcaagattggacaggatcggatcgaaaccacgagatttccgtccaaagctgatcatttcatctcgatatcaattgtagaatccccgcggtgtcgatatcaatcatcaaacccgagcctcgaaacgcaatcgcatagctcaacacacaaaagatgtaaacgcttattccggctgtccaccgaagcggttcttctccatgccgaggtaacccctaatcttgctctccttgaggagctcgaagtacttgtctgcaaaagatatataggtcagtacaacgcatcgcaatcaataccaatccaatccaatccgcatagcccacaatccagtcagatcagggtatttcgtagacaaatccagaacaccgaatctcctggatatagcctagacaggacacagaatacggaaacaacccacctcggtaaacaccacacttctcaaggtggttcacgccctcgcgcgcatagcacttgcccaattcctcgccgacgagacgcgccatcatgctgcggacccactgctcacggataatggcatcgcgggcgttgtggagtgcgacgttgtcctcgaagtcgacgccttcgtaggtcggggcgacagtgggcttcttggcgaggaaggcggcggactcggcggtgggcattgtgggtggttggtttatggggattgcgttgaggtggggttttgctggggttgttgcttgctcgggcgctgggcagtgacggcaagggttgggagagtgttctcttgaaagctgcttgatgcggtcgtcggcacgttgatcttgaaggttggattacgtgggttgtgattgggtggatggagggcggtcagggtggtgtggtgcgggagagggagaagaccttctgcgcagatctgaaggtcacgtgaatctatacaatctgcaaacggcaggacagagtgagcgaggtttggataagattgaatttttatgtggcttagaggaactaggcactattatgttcagtgaagaaatgacttgcgaaaatatcatattttcaatgaccgtggttgatcaagataatgcggcattactaaaacgatacatacatacaaaacaaaaactttaacacaagacctcctatgatgcgaggcatgaccacatggatgcaaacctgccgtggaatatatgtgatgtgaatggcataaaacagtaaggttcactcatccccatccacaaccttccccgtcatttggtcgtatagatcaactacactatctctcaatcgctcccaaccagaccggccaagccaattgctcagttcgcgatagtagtagatttccgaccagcaatcacgaccaaacatacacccagccatgttaacgacgaggtcgtgtgctgcctgctgatagtgaacgactggattctctccgtcgccgcatgcgccaggagggaaggaattgatgctgcgttgtggtaaaaagccaacaccgctccggacccatggttggctctgatatatgtactccagagcatcttgttctttgtgctcccattccatgtgcatctgctcgtacatgacgggatcccaccagacatcgagcagccgttcggtccaaagagaccgtcgcaggaagaaagatccgagattgaagccggagcagtcttgtgtcaggagcatattcaaagaatctgcctggccatcgccctcgcgagaacgaccgagctcatcgagccagaactcgggtagtggatgggtgatgttgatagggttataggcattgatatcacggtagacgtgtgacttgaggtcattgaatatatggtgttggagagatgtgtcgtactccatgacccaggtgttcaagtcgagccaccaaaaccactctgcgtctggatacttgcgcatggctttgcgaatcacatcgcctttctcccagctctcgcgccattcatgtgaatatcgcttcttggccagcaaattggccagctcgagctcgtagccccattttttcgcatatctcttcttgttccatatgctgttgcgctcaatggcccattcacgggcacccttccactccatgacgcctccctctacgttggatccgagtatgatgacgaacttgctcccgccgcctataggcgaccttcggtatgtttggacaatagctataatgcggtcagagtggcacgtcgaaatgatatggaattagcaatcacttactcgcccagcaaaacatatagccgatccacaccaagaacagcgccaataatagccggaaccgaccccggcgcactggtatgcgtaatgcgcctagcagaccacgcccactacccggacgattccattcccgaccataatcatccttgtcgacgtatccctgcgacgaaagtcttctcaagctaggaaatcgagcgaagatcttgtgtcgttgtcgagagaagaagccgctattgcgtgttgagaatgatggataccggtacacctcctcgctctttgccttggcttcagcccatgaaacgctgcctggtgtgcctggcagtaatgaaccggacgatggtttattcggcgatgtgctgccgctgcccggaacgagtcccgggctggaccaccccccgcccgcgtggggagagggcgaccgcgataaggtcatcgcaatgatcggcgccgaatagttgtgtgctagagatcgatcgctgtgaaatcttgaggccatcgaccggagagtaatttcgtaattgcgagcgaagggggttaattcgttgtgaggtcagagtgacagacaggacgagtgggatgaaattaggaaagaagagagttggcagttaagatacacaacacaattcaccgtggggacattatacaccggattcgagatgcgaggaacttgaggccgaatgcggcatgtctgtgctgattgcatggcattggagcaggtgcgggctgactttcggtgtttcccagcgttgaagttgggaaattgggttttgatctcgcgttagtgtcaatactcgtaaaccgaattattcccaggggtcaatgactcctgctgtatagttgacatacagtttaagtctaatttaacctacgagctactcaatcaagcggagatcaatttgcggagcgcggagatcggctccacattcctacatctactcgaccgcttgcggacaaagaccattgtggagtacagaaacaattaatatcatgcggaccacgcaattactatctatgaccaaagcggaaagactaataaaaccaaatctcaatctacttccgatccttgcattgggactgaatcggcattcgattcgtcgtcctgtcggccttgctcatgagagcttgtcgcaccatgaaaccggcttcaggtccaggccggggctgggcgctctcaccatgggtaaattcgcactggagcttgaggaacttcgttctgtctttgttttggtacacagtgataatgtcgccggtgtagagtttcccgaattgtaaagcctcaggaccatcctcggtcatagagccgcggcgcaggagtgtatcattcacccagatgccaagacgcgctttggtggagagaatagccataaccccggggatatcgagccagctttcacctgttgcgatcctcgcctcgattcctggagtccaaaatgtgacctctagtgcataggcggggatcctagtgtccatggaatcagcatgcttgacggtcgcggacggcccgcgaccccaggaggtgagcctatcctcaaggtagattgtcaagtcgaatatcgaaccgggaaggctcttcagtttgccatatcgttttggtggtttggcaaactcggggtcatagagagtggaaggaatagggggtgagttgggtctatgaacaatcggttctgacgagtctgcttcctcgacacagacccgatccaagatagcttggcctgtctgcgcatcgagggtagtagcaaactcaacgtcgtattctgatttcgagggacgagaggggtagttgggagtagtgtcgcggtggctgttgtggtcactattatcgctagatgcctcgctggctgtgtcagggattgcaagagtgaggtcaatccgacgtgtgaacttcgctttgggggttgcctcctgtggactcgagacagattctgccttagggctcgaagtcggcggaagagaatcctttttcgggctactagatagtgtctcgcccttggtgtgtccaggaggggtctgccgcaaggaggatctgttaaccgggccacccttaagttgcggagtggggttcaaggaattcatgttgagttgcccaacgagtttctctgcacccatcaaactgggtgcagtgccaccgaagggtaccgccgggagggaaatgatcgactcgttgggatcgtcgctcatcatcgactcaccggaagagagaaagtcaacgtgaaaattattggcgttgaaggcctggatattgccgagtgcgtgggagctccgtagagccgagggggtaatttcgccaaacaaacgtttggcactattgtccactaccgcttgtccatcttggaagctctcaatatttggaaggctgggatagtgtacatcagtcggaatgtactgggtacgggggcgtttggagattgcttcgctgccgctactctcctcgccgtcggcttcatggacgtagcccggaccgtcagcgatagacaactgtgaagcgtctagctcgtcctcgggatcctcgccaatgattgaaagccgatcttgataatcatatagcaagtcgtcatcatcctcatactcatccacatcaggcacctcggagatccaagggtgctggaaacacttcttctctgtcgggcgtgagaaaggatcgcgattgagaagctgggcgacgaaatcgattccagcctcagacacgcctgccgtgcgtaatgcatcgaaatcagcgtcgcttgtcatgatggtgcgaagcatctggagacctcgatcttctgcacgccctgagaatgggggaacgccggcgaggatatggaaaaggactgctcctagcgaccacatgtcaacggattggctgtatggggatgttctggggggtcttttaacgtcagcagaggcttctcaagcgaaaggaaataagtgacttacgggtctccaacgcgacgcctctttcggagctcgccacggcggtattgatcataatctgggtaaacttccggcgcgcagtatagaagggttccacaaaaagtttttaggaaagtctcctgctccaccactttcgacagcccaaagtccgatagcttaattctgagcgggtccaacgaggcaatcaggatgttgtccggtttgatatctcgatgggtgatgtggcgtttatgcaaatagtgaagcgctcgcaacacttgtcgtgcgatcgttctaaccatttcctcgggaattctctcctgcgtgtgcaggtatgtcgacagctcgccgcctggaacatactccatgatgatgtagatccatcgatcatgctcgtgatgatcgatgtattgaacaatattcggctgcaacacgttagttctatagttaacatgcaatcttaaacatattgcttacatgtctgagatctctcataatcttcatctcattgtcgaccttctgatcaaggataccgtttttcatgaagcgacgcttgtcgagttctttcgcagcatagatggcgccatgttgtttggttgcgatcttgtacacagtagcaaaggcgccctttccaatctgtccagtcacgttgtacatggcaccaccggtccaatgcatgccataagcgttggcggatgaccacgctagagcagacgggcttgggccctgtcgctctttatgggccggagcatgtgcatgaactcgttcgaaatagcgaaacaagttctggtgatagtggactgcgaatccttctcgtaatgggattcgaaccacgaaccggacctcgtcggagttttggcagccggtaacaacttgaatgacagatccattcgtgagcattcgactattcccatccttctgagattttcgtaggcggcaattgtccacaatggtaccatttgtcgacgtatcttgcagcatgagaatgccgtcctcggtaagatatatgcgaaaatggttatttgacactcgtttggcattatcatcgacactcagaagaatatcacaacgagaccgattgcgaccgaagcaaaatcccagtcccaggttatgaacttttgacgagagcctcaacgccaaatctaatgatgcagtgtgagaggagtcgtgccctagtatgtccctttggaggatatgttgaggacatattccgccagtggcactgacagcatcatgggcagcatgcgaattcggatgaaggatacagataatgtcggccaggtcttgatcttggatgccggagttattcattcccattcggcgaggatcagcacatggctgcgtggattcctgggtggcttccattatgagggtgaatgcaagtgtaaatgaaggtgctaggggaatgaacacagaaatgagctacgggtacggatccgatggagtagggtatatgtgctgcgctgccagcaaggggaatgtgcataaaaaggtcattaaaatgtcgtagactagatatatgatgtgtcagtggttttgcgccaacagcgaaagctcggagagggtttgtatatacctcgagggaatgaatgctagggccggggagccgcacacccgggcaaaagttggacaagacaatgaatgatatgtacgcttcaggaccaatgatacaatcaccagggtatgtgtcgcctcagcaacagattgcccacgaacgttttgcttggtgatcgcaaggagtggaaataggcaatcagatgagcatgagcgataagtgaaccgtgtgccttgcagagtggggagtccctcttcagctcttctcgaagctagcgttgatcaacacagatgatgaatgatgcacatgagacaaaagcgagacttcaagccctcgtctgcatgtcataagaatacgaatcttgattatggggttgcagatgtcgaccggcgcagaccgtcaaatgccgtttaatgagaagctaccgaatgctgtttccgtattaaatgctcgaattagggattttaagcgtcgattttgagagggccaggaggtatgtctgtggaatccagttttaacaagttagcaaacgtcctttagaagcttgaagaggcatttgtttagccccgactcgagatcgagaatgaacgcacacagcctgaaatatccccgatcaatctgtccgcgggtagcaaaattgggacagtagatagataaaaacggggacgccgggacagagcaaaattgcactcctgggaaggtcgtcgtccgaggaacaagaccaggaacgagccgcaacaatcgtgactcggtacctgaggcaacgacgcgttcctaaggcgcgtaaccccttactcatcaggcaacagagccgttgattggccgagtatgtgagaggggttaaccactcaagttcgatctatgaaatacagtgtacacgataccattatgaagtatggctatagattcgttattatttacgtcaaactatttacttccatacggcttgctagtgtcttcactccgtttgaaatcacccttcagcgcagtgtcgaacacttgctccagccgtgcgagcgcttcgtccgatacctctgtgacaggtcagattttcagtcatgcatgctcagccctgaagcagactacccaggtaaggaaccacttacggtaatggaccacaacgcggccacccaacaatctcagccctttctgctgtccaatctctgccaagtcattcggccccactcctgatgcttcgagatccaaccaaaccatattggtgtgcagggggtactctagcttgccaccgcgactggtccacagatcggctacccgtttcgcctttgtatgggttgctgcaagcttcccggtctggccgttggggtccgtgccaaaagtttcggtgagcgcaacgcgggcggcagctgcaatcacgccagtctgtcgagcgccgccgccgatagatttgcggaaccagcgcgctttcttgataaactctcgggagccgacaatgatacttccaataggtgcccccagccccttcgagaagcaaagactaacgctatcgaagatgcttgcatattcaggcaagctcccagcaccggccgcgacggcttcccacagccgagcaccgtccaagtgaaccttgatgtcatgagcatgagcccattccacgatccgcttcgcctcagccagcggcatgatcatcccatcgagagtattctctagactgatcaacttggtggggcaataatgaatattatcaccgagaactgcgtgctttttgacgtcttccaaagtcaaatgcaccccattcttaggaatgacagtgctcacggtggcgccagtccaagcactcacaccaccagcctcataacagatgatatgtgatcgatgatcacacaatactgaatgaggtggctgcgcgagatgcgagcgaatggctacctggtttcccatggtacccgaaagaaccaatagactgtcttcatgtttggtaaaatcagccacgtagctttgcagctcgttggtgactggatcctcgttgaagacatcatccagaagagttgtctggcagatcgcttcgagcatcgacgctgtaggcttcgtcattgtatcgcctgaccaaaatcagcttcaattctgtcatccttttccgatttagtcatacttcggaggtcgaactcagcggctccagccccatgccaggctgtagtcttcttatcactgctaccaatgaccgccgaggcacgagccagggcatccgttgagagttgtgccatagcaattggaaagatttttcgaccgtgcggggctgtcaatcgaaacgccgaggaagagcaacggatcggatgtaacaagcgattcatggatgagctttatgacagtaaccgcagatacctgttgagggaattgggaaagaggggagtcgccacgtgatccggagacagatagctcgctacattgtggaaccgggatggatctcatcctcatctgtacagcatgttgcagcggtggtcggagggtaattatattcataagcccggtgctgatacaacctgaaccttgcgttccatccatcagaagtgtacaatctgtagctccatgcctccgcggctatgacgacaccgttcttacacagtccttatcgataccccaattcggcctagtgcatccaacggtcggcctcgaccgctgactcagcaatgtgcttggttgcgggcaatgcgcttgactggttcaagtccgcacaatcttacaagactctgattgcttacactaggcactgcttacactgggcacaatgatggacctatcccatctcacacggcctggcattctgtgccagtgtgctcgatgttccagctcactggctgcactggagaatgagtgggccaaactatctaatgcctactcaatcccgacagcatggctgagtgtcgacctccatcgcatcgcggtttcttcggagcggaagcaaatccctcatacatcggatatgacccttctgcgtggccgtgtcattcaagaagtgtcatgtaaactctgccagcaaaggatgggggtactttgtccacttgacaacgggtaagtggctgtcgatcaagaccggggcttctcatagctaatcttcttttaggatgaatattttgtggaaaatgtcgaaagttgcttttagggagattgttaccatgcgaacggtgcagcctgtattcaaacagggggccctcgaacgactgatttgtcccccgaaagaacctccgcgccgaaacaccgatcttgtccagggaaatgcagtggtcccagctggctccaccgatcccactaccgtcgatccagcgatgcaaaaacaaatgatccaccagggtagaagtatcgatcagatttcgaactcagtgaaccacctccaagatacaatgtctgatctcaaaaactcatttacagcccttcgaattgagttgaatcgacccggacggaatttggcggaaggttccatacttcaggggcaagactttgacatgattgctatggtgctcaaggagctcaaatccaagtctgacgagatcgagaaactcaagctggagatcgaggccctgaaactgaagaatcgctatatgggagtgaccctgccacaccagcaagagtcattgtcgatcatgaacatgaatgctgcgcttcctgaagtccggagccccggcttactccaagcgggccggaaacgcaattggcctgacgcattctcgggcgatcgcagccagacaatcgcggattccccggaggaagatgatatggtggatgaaatgtctctatcagatccgctgataaagagctctcgcattcctctcaatgaccaaccccaaccagcaattatcaatggtccacctggtgaagagcaactggagtccctagaggggctgatgtctgctcgagaacctgaaaatatctccatccctcttcaaccccaatccaacttgcagcaaactatagccaaacgtccgcgcctaggtgtgcctttcgaggaaagcccccaaacggcccctccgcagccgcaaactgttcctcagaaaagaccgcctggcaggccgaggaaatcaatcagccagcccactatccccgatctcaccgaatcacccagtatcgctccttctaccacgcaggggaatgtggagtcaaacgttcaacaaaacacagtacgacgtcgcacgtctcgtcgcagcttgcgtgcgcaatcccttggtccaaataacagccatgcacatagtgaagaggaccagcagaacacacaagagtcaactgaagctccccctgaggctcacccagcgcccaacaaaaagaccaagcggaatactggctcccccaatggaaagcgaactggcggtccagacgaggacggagatgaggccgctatgaatgagaagcggaaggctaaggtcgcggcgcgggacgtcatggccaagatggctttacagcacgaggaggctttggaggctgagaatgcatgataaatcgccagcacttatcactcacagacttgtacattagacaataaaccacacataacgtatcatgaccaaagcttcaactgagaccggctgataataaagtctgtgcgcgccctcgtatacacctagaacggctcttatataaagccctagtaaattggaccaagtatctagctcacttcttcctactctgattgagagatcaacgtgataaactttcttgttcaaagccacagtatatcagtaaagtcgaaacttggatttgctaacctatgcggatatcccctaacgcagtatcatatcataacctcataaaaatcattattttcagtctgtgatgtcccagagaatcttgcgagtgtcactagcgagtcgggataaagtgcttggaactggcctcttgttcgctgaatgattcagggaatgctgcgataccaccaatgatgccaatagccatgaaagcaagagaaatgagagaccagatgactccccagcactgggaagatccaccgtatctcttagcaaagacgctggcatcggagctgtttactttgcgaaggatgagatcgtcgcactggagcacatcttgttagccacataagtcaattgagtgcaactggtacttacaatatcccagacactgtacaatgcagacatgacaccaatgaacagctatagagaaaagcaggttagttcaagttcatgacgggtgaatcataggacaacataccacgacccagcgcaaggcttcaccgtggacaatgaaccagcatgccaccaacaatccgaccgcgagaagaatagttacgatagtcaaccagtctctccgcgcccaccaaagggtaagcagaaagcatacaccgaggacgaaactagcaaccttgcttgcgacaatatcaaatccagcgaagatcaacagagccccgataatcgaagaccccaggtacccagcaggcaaagtgatggcactcataccgccttgcatatgggtaacgccgccttcatttggatccagcgagatagacttgacttttccaccagtacagcaggcagtaatcgcatggccgaattcatggaaggcaatcaccagcatctgtgcagtaggttagtcacagtccgtcaatatggggctgggagtatttaccttgaacggccatagtacccagcggacatatggtagattccatagtagtgcgatgaccaccacatacactgccattatccccaaggtgacggcttgggtatggttgacacttaagccacgccgggccagttggtgcggggccgtttccaccgcgctttgggctagcgctgcatatagggctggcatggtgagcgataaacaggctccgtaaatgagaaagagggagatgcagatgttgaaatgacggaggaagcgtaagtgcagaatatttaatggtcagctaatattcgagagatcatccgcgcgtccatagggccgcgcatgccagcagccacttgttttgttttgtggctgatctcccttgggctatttttagtggcttggccttttaggctgaagggtttcacctttacgtcttcagtctatcaacatattgaaatgatattcattacaattagcatacattcaattcgctatgttctttaatccatatgggagatgatttaactgaaaatcaatacgagagggttgcacctgccatctgagttaggttatatatagtgaggttgtgaggaagtcacgtttgacaagctaaatgtttctgaataggcaatatattattcgctgctctttatccattcaccattcattcaatctcaaccgctaatcccacagacagaatgagttgtctaggacgcagaacattgagatggtggttcacgatgttgagtcttcgacggcagtcccccggctcgcggcatcgagaccgtctccgagaagagctatgcgagcgtcgacacgcagagacaagttggcaaaagcttagtgagacatcagatgtccttttctcaataacccgggcccaatacgacgggtttccaacacggaatccttcttgcttgtacagcctccatctcagcccgatctacatgtacatggttgcaaagtacacgtcacgatggtccttcttcgaagcagccgccctcttctgcaatgcccggcactggaatcttgtgcatgaggtcgtgaacccaagcaaggatcacaaactcatagaagtcgctacccgccatgacattgaccacacggagttccagcgggtgagccgtcagcttcgtatttggccactgcttccatgaatcacaagtcatgattccggaatagtccatagcgtagctgtatgtttgctgcttagattatgtgacatacgttacgagtcaattcactttctccgtttctctttgcccctcgataacaggctcagctttaattcacctcagaaaaggtttttatcattaaagcttactggatcaggtctgaccttcccttttaagtaccacattttcccatctacgataaagttcaatcttccttgaccgctcaccttcaccagttccgtatccacgatggaaccccacgaagaagtgaactgtgatgaccgttcccatccatctcctcaagctcagcctaccagttttaagccggtaattattagtttgtatggcctccctgggtctggaaagtctttcctactggaagaactcaaaacggtactcgacaatgacaaatttgcgttctatgatggcagcaatgttatcgcagcggtgactcctgggggtcttgaagcattccagattttgaccaaagagggtaaaaatgatgcccgcgagcgtgctatagccagagtcaagcaggaatgttccaacaccgggaaaagtgctatagtggctgggcatttcatgttctgggccgaggaagatgagcatggccagtcagtttgtacaccgagcgatctgactacgtatactcatatcctatacctaaactccccagctgagctcatcgcggagtatcgttcgaatgatgttaaacggtgccgccagactgtgtcaacctctcatctggccaggtggcaggaaatcgagcaaagccacctctgtcaactttgcagatgccacgatatcctgttcacgctagtgtcgccactagtatccgccaacaagctcggttccattgttgaggattttcggatgcatacggaggactacaacatgtatctcgccaaccaaagaatggaagacatactcgcttcctcctccacggcggaaactgtcatcatgatggatgcagacaagacgttggcgtcggaagatagcggagttcttttctgggagcaggtccgcagtgcttcagctaagcgcaaccccttaaaagctttgttcagtagtccactaggatattcgtacactgcatttcgccaggcaacactgctgtatgaagaggctcttgatgatgtggagtttgaggcctgttgccagactgtttcatcaatgatacacatgcacattgatattattgatctcttctacttgattcgcgatgcgagtcatgtacgtgtggtcgtggttacctgtgggatccgatctgcttgggaaaaggtgctgaagggaaggggtctcacggtaatgggtgatattcgtagtgaccgcacgagtgggtggtatgatgaatggccgacgcacttgactgaatgctggagatagacaagttgcttccagtgtgtccatgctggtgctgcatagcggtggtaggatagggaatgatgagtagctgagtgataggccatgcagtgggtgatgtcaagaatgggatatggcccctctaggtcctaaacaagaaccttggtttttgttatggtctagtggtaaattacgctgcacgaatttcgtcaggtgacaattgtggagtgctagaggcctcattcgatcaggataccgggtgttgctctcgcacagtgacaataatgactttaatattgagctagagcggttagacacatgccagttggtctggaaggctgtattgagtacccacctgatattgactcaactcaagcgaagcgaacttcactctactcttggcgattcgtgataggtaggaattgccgtgtaaagttaaacttccactgcaattttataattaaacagtgtcaccgtccgtctctgcagcaaagtatgttgtggatagccgggaagttgatcgagagaatatttagccgagtttctcaacaataaaagcaagagatatgtaagagcatcccaatgaggtcttgggacaattgagtctcaaagacgcattaggaaccgtccatgaaatcttcatttctcttcatttccccgaccaaacaagcgtttcggtcttgacaaaatccccaaagaaatgtccggaacgatgtcattcgcatcagtgatagcgtgggtgcctgccaatctcatggaagaaatattcgggagtgttcaggtacgttcgacactgggacatataagctgcgcaagaatctgtcacagaggtagctcattgatgactctgtatataactcgttcccatcgtggatagccacctagttaatggggactagttggaaagggtcaaaggtgtctttgggacttgaaactcactgggagatattccacacagagcctccttctccagcacctggcggactcatgtccccttcggatggtactgagctgcgccctacgcaacaggctagatgcgtcgttgtgtactgaggttgaagtaccgagactacgcctcaaatgtgccaaggcatgaacaagcctgctttgtacaagctccatgctcgggaatgttgaatagtcatcagccgagagtgtatgtggaagacacagagttgttggagcgaaaagcgagtggggctctgcttttgtggtctcggcccgcgccccactcatatccatggttccccaggttacggatgacgcaggacgtgaataataatgcctttttgaatgttcgatgtcgatgttatattaatgagacctgggtatatataaagggggttacagaggaccattttatgaatagccagggatatcgctgtcaacaaagtggctggattggttcctgaaacaaagtgaggaatgttgctaccagcttccagtgaaccccgcattcaggagattgggatcatcaactcctcagatcgtcaaagtgggatccatgtaatgtacggacatttgcctcccaccaacgttctacatcaccatgctcggcatgctccctgtcctcctagcgggacttgtaggaggtgcaaactcccagccaaagacagacacaacctatcacaaggatgctggtgtcctcgaatttgtcaaccctctcatcggaacctacggaacaacaccgaatggcaatggcggcatgatcccctccatcagcccgcctttcggaatgacccgctggacaccgcagactcgcgagaacttcatctcgcaagtaccctacggcgatagcgaccgcctcattcatggattccaagccacacatcagccggctatctggatgggtgaggcgggtcaggttgtgttgacaccggggatcggtgaagtgcagccgttgtttcagaacaggggattgcagttccgaaaaaaggatgagaggagtacgccgtacgtctatgaggtacttgttgatgctgctcagctcttgggtcatggttggaatgcgacggctgaggctgtaggtgatgggcctgttcccggtggtgcgggttccgtgccggatgaggtcaaggagggtgccaatgggcggacgcgaaaaagacaaattgagtatgtcctgcctagtagagatggtaatcagtataggcagtcgattcaggtatttccactttttttgggatcgccatgaatgctttctgacgattccagattgccatgtccgcagattcccatgttggtcatcttcgatttgacttccaacacagtcctaccaatcaagatgaaaaatgccagccgtgggtatatattcaagcttcgcgtcggaactggacaggcgaaatccatattgatgcgaacagtcgggaggtctacggctataacactgagcgtcaggattacctcctcggaccagacaaagcagcgtcattcaaaggatattttgtagctcgcttttctgagccatttattgaatttggcgtggcagatggagggttacttataaaggatgaggctcagcgacacgggaatttcacgggtgcatatgtgaaatttgctaactcgacatcgcgtgtcgaagtgcgcaccggagtttcgtatataagcattgcacaagcaaggaggaatctcgtgatacagactccagatgagcacaccttcgaggataccgttgaaaaagtcaaatcagcctggcttgagaagttgggtagggtatccatcaagggcatcaacaagaccgatgcggaccacgaccctcgcactatctggtataccggcctgttccatgctctccaatatccaagcgacttctcagagccaacatcgaagcacgaagatgcttcccgcgttttttactcgggatataccgatagtgtccacatcgagaacgactcatactatcagtcctggtcaatctgggatacatacagagccgaacactctctcttaactatatttgcgccggagcgcgtcaatagcatgatgcgatccttgttacgcatcttcgattggtccggttggctgccgatgtgggccaacttggtcgagacgaatatcatgatcgcaacgaatgcagatgtcgtgcttgccaacgctctggagcgagggtttaggggcttcaatattgccaaagcttgggaagcggtcaaaaaggatgcatatactccgcctgacaacgatactgatactctgtactatgaccgtgagccggccacatcatatgaggcccgcgctggactcacatcatacatgaaacagggctgggtgtctaatgatggctggtctgaagccggtagccgcacattagactacgcatttaatgattacgcctgttccattgttgcttcctatgcgggagaggacaacgccaccgtgcaagccctcaagaaacgaagtggaaattatgcctatctttggaataaagagactcaatttatgcaagcgcgcaacgcaaacgagacttgggctaatagcacttttggatggaccgaaggcgatgactgggtctacacgtttgatgtgatgcatgacgtgaaaggactggctgagatttttggtggccgtcaagccttccgcgataagttggatgcgcatttccagggtggtcacaatgaccacacgaacgaaccaagccaccacgtaccatatttgtattcagctcttggttatcccaaccaagcagctgagatagtcaggagcattgcttgggagaactacaacgcgaccagcgggggcttgggcggaaatgaagacttgggacagatgagtgcttggtatgtcttctccgcattggggttttatcccgtcaaccccgctagtgatgagtatatcgtcggtacaccattatttgagcaagtgtccattcgtcttcctagtggagcgagcactggcggagaagttgccaatgggaaagagaggaggcttgaaattagtgccccggaggcgtccacgaagccgtatattgttagtctgaaaattgatgggaagagtatcaataccccgatcctgaagcacagtcagattgtgaaggcggcaagaatcgactttgagatgagtgctacacccacttcatggggaagtcgccccatatgggaaacttgataccaggagaacatctaaagtccccggaaaatgaggacaacactagctgtgtccatcatgtgtttagacgtttccaccaattgaaagtcgattatattttcgtagatcttgtccgggactctgttgtggtgcctttttccaaggtcgactttttaatcgacttgatcttcatcgcctcaaattcccctgctccatcttcgatatacccatgtcgttttgtgttttactcattggagctgacaatgagttccaccgcccctcattgattttcttatcacctcattctcgaggtctgttgcaaagtattgcgccatagtacatgccacctcgcaatgaacacacaatttcttggccgcggatagagttcaactcgactctctaactggtcgcaaattaatccttggctttgtttatgacctggtgatggtatatccccatgcctgctggagtttatcatgcacggcttgaacaaggattagaccgcgtatcaaggcaatacttgacgaagctagaatctaacatgaacgccacaagagctaaaattccattggcatattccgtcttatcacatcattatagtagtttctgatgacgcctgccgcacccctgaccgcgccccagttattgtaggggtccgagttgtacagtagtatatgtacatgcgaagtcgcgccatgtgtccacgtaagatcaaagaattctctccagccttcccttctgccttccgaaatgggtcttccatctcccgtacgggaatataccgagtcggtccctcaatatgagaccagcgacagtgatagcctacagtataccaccgaggtcggtgggaacacctccaaggccacataccaggaggcctcgggagcgcccgttgaggttaattccccgctggggtattcggtcggttgggttacagtggttttcctgaatttgagtaagatgatcggaacgggagtcttctcaacgcgtgcgtacaacccaactttctctggattatttgatatactcacatagaatagcgtcgaccgtcctcaaaggcgccggctcggttggtctcacgttgttttattgggttattgggtatttgatggcctctagctcgctatcggtctacatggaattcgcatcgtctttccccagtcggtccggctcggaggttgtctacttggaacaagcgtatccccgacccaagtactttttccctactgtgtttgcgatgcagacggtgcttttctcgtttagcagcagcaatgccgttggtatgattacatcgcgggtgaatggtggagtgacgtgtactgactttgtctagtactggcccagtatctcttcaaacttgcgaattcggacttcaccccatggaaattgaagggagtcgctgtggcttgctatactgttgcagtactgggtgagtggtactccttttatctgtatcacatgtgctgatgaagtcgccatagttctggcatttcacaccagatggtctttgcgactggcaaatgcaatcgggctagtcaaactgctgacattggtattgtaagtgttgatccacaatatactcaactcaaccggtaaagctaactggcacttagcattgcgataactggcttggtggttctcggaggtcatacctcagtgaaagatccaaaagcaaattttaggtctgcctttgagggcagtaatgccgcgacagcctacggagcaaccaatgcattgaccaaggtctggttctcttttgcaggctatgagaatgcgttcaatgtcgtcaatgaagtcaaggtatgtacttcacatgatcatgaccacttgtttgctaacaagcactagaatcctaccaaaaccttgaagtggagtgcgccgctctcgctgggggtgacggcaattctgtacgtgctggccaacattgcctactttagtgctgcaagcaaggaagaaattctagaatcgaaggtcgtcgcggctggtgtctttttcgagaaggtattcggaactggtggtgcggcatccgctttgaatttccttatctgtgtgagcgcttttggaaacctgcttgccgtgcttcttggacagtctcgcatgctgagggagtgtggaaggtcagtgatgaaacagaatttacttttggaagggaacctaatgagttgtttggatatagacaaggtgttttgccattcacttctttttggacgtcgacgagaccgtttggaacaccgctcggtccatactttgtgaaatgggcattcaccgtgttgatgatcctagcaccgcctgctggtgatgccttcaatttcggtacgcccttttctattatctgaccttctagttgatcatttctccagaaattgaaagacagtttgctaattttggggaatagtggtggatctcggagtctacgccacgacaatctttggtctgctactcacaataggcctggtgatcattcgagctcgtcgtgcacgcctcaatctgccaaaacctgaatacaacgcctggcacgtttcagtggcatttgcaattctttcgaatctgtacatggtcgtaatgccatggtacccgcccagtactggggcgaatggaggcgatgtgagcttctggtatgcaacatattgtgcggttgctcttggaatgtaagttgttcctattccaggttgtccctgtcggtatagatcactgacgtcaaagaattaaaacagtgtcggtctgtgtggagtctactattatgtctggatcaagcttctgcctcgaatccagggattcaagtgggagcaaacggttctcaaactggataatggtgccctggcgcatcggcttgtcagggtgcccaagaaggatacctgagatatgtcattaggtaacctaataagagatgcaactcttggtatattacccaactactccgtacatttatatcattaccctttcgcccttacgataccattttagcgtctaagacgtgatctcatattggacgccaagcctgtgcgggactccacttcccccggggccgacccgttccttttccagctgtaatcatatctacacctcgcaggatgcacgacggaaggaattgaattaacttctcaaggagctgagattgatacaatctgcagattctatctcaccacggggttatgggctgaagatggcaagcgaagtggtaccatgcgatgaaccgatgggctgtcggctagggagcctatttctccgtgagcttttgaggctgttcatcattagacaaatggatggcactacaacatacgatcaagactctgttgctaaggttgttaagggcgtagcaaactgcaccttccaaaacttagttggttcgttctcggggtcaaatgcctgaatgctttgtttgagcgtttatctttgcctggtttcagaccgctttcaggctgtatcgtgtactacgtattggaaaccgggcgggaataactaactatgctctagagtgcacgataggctgtttgtaactgtaattcgggtatctttattttctgcccgccagaaataaggcattcatgcgtcaaattcaggcaagcagctttgagcgctataacgtaatccactaccgagctggccacaccaccgagctggccaccccacccaaaacgcgtccatgaattagcacttaatgaattcaaccacccaccatgccactaattcgctctcaaagctctcgaaattcaatagagcaagaaggcaggatcttattagctatccaggctattaagaaccgagaaattagttctattcgggaagcagcacgcatcttcgcagtaccgagatcgacccttaccacgcgcctccggggcgtacaaaaccgcgcgatttctcggcctaactcacataaattgatagaaatcgaagaggaatcgcttataaaatggataatatctatggattctcgcggatcagcccctcggccctctactattcgagaaatggcgaatcttttactcaaattgtacggaataaccccggttctttcagtcggcgagaattaggttataaagtttgtaaaaaggtatcccaaactcttaagccgattctcaagacactataactataaacacgtaaagtacgaagacccgaaaactattagggagtggttttatcttatttaaaaaactatcctttaatatggtattgatcccgacgatatttataactttaataagactggttttgtaataggattaactgtaaccgcgagggttattataagggctgaatattacagttaccgatcgcttttataacctagaaatcgcgagtaggtgactgtaattaagtatataaatacttcaggatagatattccctctatatatgatttttaaaggtaaagtctttattaaatcttggtttaatagcctccctaacgattagcaatttaaagttagtctaaacagatggacctctaataaaattagacttcgatagcttaaaaagctctttattccgttaacttctttatagacaaaggggagatatcgacttctaatacttaacggccacagaagtcatttaaccctaaagtttaacaaaatttgtgaaaaaaataatattattctaatctatatacctccgcacttatcttaccttttacagccacttgatatcggttattttgcagtattaaaacgcttatatagtcagatagttaaaacgaaaatacagagtaggataaattatatcgataaacttgatttcctcgaagcttacccatctgcctaaatcgaggcctttaaagaggatactattaaaaatagcttcggagcagctggtttagtaccttttaaacctgatcgagtgattttaaagcttaatattcgccttcgaactccgaccccccttttgagctaagagaacgagtaggagctaaaaacaccttcgaactataaacaattgctaaagcaagcttcctcaattaaagcattgctttgtacaaggtctcgaagccctccgagcccgcttaattctgcgataaaccaggttttaaaagcctattaagttacaatacaatcggctgcttttctcaagaaagaagtaagcaatttacgggctataaacgagaagcagaagcaaaagcgcactcgatctagaaagcagataccttctaccgagggcctctcggttttagaagcatcgacattaattgtacagccagaggaagcaattaaactacctccccctcctcagccaagaaggccttcgccacctttattaccctgaacgagagtgttaaataggtgcagagcatgtggaaatctcgggcataaaagaaatgcatgtccagatagacctagatagatagttttattaatttatggcgttttggttgagatatattgatttaaaattcagaggttggttttggtggccagctcggtggtgtggccagctcggtagtggattacgttatttagactttcccatcaccatttccccatctgatacatcccaacgaggccaatttcatcgtgagttttatttctatctttacacgcttctaatagctaacatctacacttggactaggcactctctgcgtggaccctacaagcaaagtcaagactctcatctatttaccctcatctaccaccaagatgccatccagtgacgcacttcgtatatacccccccttctgcattccaacacaaattgttatctatggctgactttaactggaacagaaccgcctcttacgcccgctgagcgggcaattgtcaaatcctacggcggctggacacgcttcatgcaaagctacgggctcaagccttgggaagatgatgatgccgaggagggaaagaaaatcctggaggcccttgctctacatgaggaagcttccaaatgagacgggtctagccggtgtttggctacaacagaaggatgcatcaccttgattttgccttggactgatggatgtcgaccatacgttctccgcaccctccttcggactttcgattagattcaatcaagtattttcttccagtgcttgcattgctggtacactgtgctttttgggatttatgaatggtagagcaatttttcgaatgcaaaaggctgtcaggtattacattagatgggcgcacgcgatccatttgacaatttcaatttgctctgcgaaaacatagaagaatgtcacataaatcaacaacgcaccaatccaactccaacaaaaccgaaaccgagaccgaaaccgaaacctaacctagtttgaccaaaaaccaattcataacccaacaccaccttgccgatagaaagaaggtccgtaacctactcggtttctcccgctggattaccggcaaaccacatcgcaaatgcttcaaaaacctctgccgtagttttcctctcagacaggtgataaagatcagaagagcgtagaataaggctttcaccatcaaaataggactccagcatacgtgcatgctcgcccatgaacgaggcgaccaaaacctgtagagtacctagttagtaatctatgaaagtaagaaagtgaaaggagggggtatagacttaccggtgccactttatggtggagtaaccgcatcatcctgaactggcagatcattaggcggaggataatcaatagctcgccacggcagagcttgctatcatccaccagtaagccgctgtgtgcgattactttaatatgtggggctgctgccccggggatgtccatgatccacgaaacgccaaactagggcttgtcacacttgtacaacgacttgaaagcatggtacttgcaaacactagggagtagaatagcgttagaaacaatggggtgatatgataatatatctcagaatagtaatggatgacacttacggctttgaacgccatacgcggtcattacactcccatcgtacctctagaccataatgtcgccacactctttcgaagtgatatgatctagagattgtgtcttcaaaaaggccttccacatcgaccgcttcatcgatcacttcatcggtaggttgtgggatgttagatatcgccgcgaagtaacggggcttgaggtccgagtcttccctaagactcatatgctcgcgcttgatgttcaacttggcgagttgcgacgcgtcgaattcatgaacctcaagagcttcgatgtcagcatggagcttgactagagccagacggtgggcgagatggacttttgattcccgagaagttggctttgaagacatctttggtagtgttgtggtaatgatggcttgtagagttgtagaaatttggaagagtgtaactgggggggacacgctaagaggaagctgatcggactaaccctaaagagatgttactcccagtatggaccgtgggatactacagaggggggtcatatgcgtgtgttggggccgattttgttagcaattgccttgcgagctgaacaggagggcaaggaagaggagagcgaaaattaggagagcgaagacgaggagagccgagcctcatatgatgtactgttttgtggactgcgttgatttcaatcatgtctttcgtgtttttgatcttttcttgatatgtctcgatttgtttttgttcagaatggtctattatgttttggaattcatgcgcgtctttgtccataaagatatcaatttgtgtattcaagaattgtaccatcgctatcgtatagtgtatgatccaagtcaggagttaattaacagtcacgagggcttatccatgaagtattacttaatgcccaggtggcaatcctgcgtacggtataattccgaatgaagcatatcaaaccatatctatgagatatttaagtcgcccttattctaggatttcaattcgaatatgactacaaataagtgttcagcaaatattctagggctcccttattcctctttagtgcgactctacatagtggcactaccttatattgcccatggcttcgaacgcagtgatagtgtgtgcgatagagagagagatttcttttggattcttcctgtcggcatccagcacgaaatgtcatatactgtgaatttcaaagcaaatatgaagcaaccttcttatcatccgtccgtaacattatcattacactgtcgtgccatgtattcaaatatcccagatgtccttgtgtatctgtaaatcctgaatcccgctaataagctatgtaaattgcaatcagatagtatccttaatgggatccttttcagcatcttcaatctttttcaaaaattcctctgccgccttagcatcgccagggaatatattctcggcaatcattctgcgaggtgagctaccaagccattggaacagtgagaaatcctggaatcgatctgcccggaaaatttccaaaacctccagcggttcatcgtcactcaggttctcaacgaagtgtcccatattccgaggcacgatgccgacatcaccggccatgtagttgaacgttctggcgtttccttctgcggcaaatatcgtaactcgcgcacgacctttcttgtaatatgtccattcgtcggcgttggggtgccagtgcatctcgcgtagtgcgcccggtgcaatctctagatgggcggctgctactgttttggaaaccgggaagttcgtggagtcggtaatacggacacgaccgccgctggttttaatgggttcttgggcgagcatatgatgtgtgaagttaatctttgacttcttgaaggtgcgtggtttctcctcgtcaatgcttcccgggtttgagccttggaatatgtacttctcggatttcgggatgttgtcaaattgctccggtgacatccggaagttctctcctagaactgctttgggagtgtgagctagggaaatgggtcagtatttgtaaactatatattttgagacatggacagattcatacccaaccaatcagtcaagatgaaggtggactcttcggagaagttgccatcgtcaaagatcaacaggaattctgtcccattttcgcccagaccctggagcgaatgcggatgtccagcggggaaataccacagatctccttcctccaagtcgtccataaaagtaccgccttctaagtctagggctgtgactcgtacttttccagcaagcacatacgcccattcagcttccgtgtgccaatgcagttcgcggattaccccttgatccagacgcatgttcacaccggcgagttcacggctagtgggtagctcgtggatagttgtttgtcgcgtccatccgccttcctatacgtacacgtctaggttaatgacgtacgtgacatattagaatgaccatacctcgatgcgaatatgtgagtctgcaaaactccatcgcatattaggcatattgccatggtcggtactcggcggacggacaagatcggggttctggcgctcgcgatcccgattccgcggtcccatgaccgtagtaccatctccattgcggaacggcagtggatgtcggtcatcgccaacagagtcaaccttgtgatcatatgggtcgcgatgtcctggggagaaaggtgggttttttccaataggctgttgaccgaataatgctgcggaatggccggctgggacctgcagtagcttctgcaggctgtgatcaggtgcagggatagcccatacagcctgaagatatgccaggtttaacaagaagcgtgtaatttgcatggtgggctttaaaattaataaattagacagaggaagagaagaaattcccagaagatcaagtgtaaactccggaaatgttgttctccgcatcgacgtcacgacattgcgcatattccgatcgcatatcctgtctccaattgttcaccccaacaaattggccgattctattttagtgcacttggattctccaaataggtagggatgacgtctcattctttacggtgatcaattttgagttcctacgccaagggctccacagaaaccgaaaaaacaacttctctccacttcaatccgacgaccattacaccaatgtctgaaacagacgccctgttgggcaaccacagacgctccaaaccctctctactatctctagcatctaaatgcttaggcagtgaccttgatactgcgcatggcgacctagtccttctattctgttatattatcaccggcctgctcgacagctcagcggtactcatatggggctcctttgtgagcatgcaaaccggcaacactgtatatttcggcctgggccttatcggcgccaaggatgatcgctggatcaagtccggagtttccattgcggcgttctgtctaggctcgctgtgcttcgccaccttccaccgtgttttcccagcgagacggagatgggtgctctgtgcctcgttcctcgctcaaaccgtgtgtgtgtgcatcgccgcgttgatcgttacaattcatccggcatctcgagatgcgcccttgacttggttggtcctcgtcccgattgcgctcatcgcattccaaagtagtggacaagcggtgacgagccgtgttttgaacttcacgggcttgactagtgttgtcctcactagtacttattgcgatttgttctcgcaccctgatttcctctcgggaaaggtggtcggtcatactgaggagaaccgccggattggtgcaatcttgtgcttgttgttgggggtggtcttggggggtctctgggctcatagctctgtgggaatgatgggggccttgtggaccgcagccatcctgaagtcattgattgttgctgcatggttggcctggaagggaaagagcgaggaggataccgaatgagttgcaaggctgatggaagatcgcggttttgcatagattgtggactcatattgatgtatttagaatactaattggttatttcgaaatagaggatactgattatactatctcagttttctgcaaccatgttcaacgactatgaaatttggattttttgtctactgtcttgaaaccccgtcaatagatctagagtattccaatctaggggatggtgtcgcccttgatatctataattaaaaaccaataagatatacatgtatgccttgggatattctccatagtctactccatctcccagcgtccaagtcaaaattcatatattcatttcatggtcattatcatctcgtaatagcctagccaggtacataagaaccaaaacgaatctcaatgtcaatagctccgctggaccgtcatcgcaggcccgacatagtgtcttctgccctgaaacaggtacatcaaaagactgccgatgaacacactaacgaaaataaccacactccaattaaagtctcgagccgaaggcaaagggctcggaggccagaacgaccaaaagagtgcgaaaataacatagagcagcccaatgatatttatcgcaagaccgaaacgaccaagactccaacgtcgaggaggtagcgtttcaggacaagcaatcttccggtaaatcacgcaacttatggataccgcgtatgtgtacatcagtgcagcaacgttgagagagatgatcgcgttgaatgcaacctccgagcctatgttgattaccgacagtaagacactgatcatgcatgagagcgcgatcgctcgcactgggattcgccgatgaaggtcaactcgagagagccagtctgcgaaggggaggccgcgatctcgtgcgaatgcatatgtttgacgtgcagttgatgcattgaataggatgttactgaagatgactggtattaggattattgatgtgaggccgttgacaccggagattgagaggaattggtggaacacgtagaggaaggggaagccggtgctgtcgttgatagcatcgggtactgaggggatagcaagaagaaatccaacgattactatcagtgctagtattccgttgccgaagtatccccatacgattgcgattggtacgtatcgacctgcatccttaacttcttcggacatatgtgcggtggcgtcggagcctataaatgtgtccatgttagccttgtaccgcgaaagaatgatacggtttgtacacactcagagagccgtagatggctgtaatttgaccgatcatcaagctgatccccatactagaccagttgccaccattgtggaacgatgtgaacacggttttggccgagttttgaggagccatggtgaacaaaacaaccacaatgatgacccagcataacagatgtagcacgagaaggatgttctggattcgtggcatccagcttgccgcgtagacattgaaaaagtaaatgacagctatcatggcgaacacaaacaaggttccatgccaattttggggcacgtagctcggatcacggagggttatgagaccttggatgatagttccagttagaaacgagccggatgctgctcctgcctgccaggctagtacggacatccatccttaatcacacccattagcgatcgtcaaagatgaatagacgagcgatctcaccagtggtgtaactcagaaacttctggtaacgaggcgaggaaaactctgatacccaatgatattggcctcccgatgtgggtgccctgttggagaaaggaaatgtgagaaatctcagaaaatgaggcacataataactcacatcgaagccatctcggctagcgaaacaatgataaagccaaacccaacgaatgtccacatgtaagaccagaatacaccagccagtccgccattttcgagaccttgggtgtttgagctaaggatgaggcgattagcagctgataagatggcccaagagactgcggctcacatgagtataaactcccaggtagcttgaagaaccgctgaaaagctcaacgctgcaaggggtcgaaagttgcgcttcaaacatgtcagtgacagtgtcctgattgtgtcacagagaaagaaagaagaccttcaattcctggatcttccccatacgcgtcatatcatcctgatcctgtggactgccctccatctctggtaaatctttcgtgggatgttcttccatcgtgtgaactctgtcaaaagaagagattcgattgtgtgattgtgggctttgcggtggcattttgacaaattggacaagtccgaacccacgttgacatatcaatatttgacttacagaagagccaactccaaggttagatattagtcaacgacacaaactaacatttcaggattggaggtacaaaaatacgagacacttggctttgccaaccgaaggcaatctcggctgttccgctgcaggcatccccagtagtgatacaacgagtcgactttgaagccgaagttctccctccccaccattgttacatacccctcgatggacgatgaaatctaccgataataattcacaccaggccacatggcaaggcctccaggaacagccggaccggaatcggcataacattttgtgaacgttggcactgccctgaagtgccacagcgcgtttcgacgcatatctggtcgggtaggaccatttttcgctcgagtggactagttcatcatccctgtcaatgactgtaccgggttttctgcaatttattgcccgcgtactccgtactctcgccaagaataagatgaatcgaatccaaccccattccccggatgccggcataaatcgttgtctggacggaattcggtaacgaagctatcagaacgccactcgctggtttgttcagctgccagccttaatttaatgctccattccggcttctatctgtatcttcccgcgtcgatgcaggaagggttgaattccgggctaggttgtacgaagaaatgggatttggaagtcgttccgagcttggttggccatgtcagacgctgccactaggcatatatctgggcaataccaaacaaaggcgcctcaaataaatgacatggcgcaaagaccaaaatcgagaactgcgagagtcccactgtggcaagtctttatttttagcgtcctgcgcgcaggctgcgtctttccctgtccgttgcgattgcaattacggcaaacgagagtgagctacacatgtactccgtattgtgttgcaaatatttctagtatgagttactccattatcttactttgttgtattcggcacaatataaatgtaacagtgaaattaaacactccgagtggccatagcccaccagacacatgcttgatcaccaactcgaagttcatagaaccttttgcatttacatattcgactggatactcaaacagtattaggcctgagaataaccttaatcatgtgcctgtgggaatattaagcgcccggatgatctgcaaaatggcatgttaaataaatacattgaccccgttcactgaatgcatccatatctaaaaattacccccgatatatgatcccaccaataggcacaattagtttgaatctgttggaattcggtagcgtctgttgaccaccagggattgtgatatctcccagaaaggaaaccacgtattccccaaatctcgaatcaagctaataatacgcaacttgaaaccaacagtacagtcacagcgcatgtcccggtggatcagccaatgcactaaggtcaaatctcagttttgatacaggctggagtggatggagatctgcgattcgtgattagtatgccctgcatcacagtgtaaatcccctgagtcagccagtcagtttggatcaagctgaatatatccttcatcgagtccctaggaacagatcaggacatgtttctttcttttggccatggcaactctctccccagtgccgcctggcttgacacccccgctgacagcggatacggaaataaaccataatggagtgattacagtcatcgcgtccttttcactatttctggtccttggatctctaggaattcgtgtttattctgcatacagtagaagagtccgtcagttggatgatttgactttcgcagcgactgtggtaagtctttccgtctcaactaatgcggacccttttagaagactgacgaatctagattcttgccttggcacaggtatctgtggtttttgtggagatatatttcggctggggaaagtcaaagtcgctcatcgctgatcaagattggaactcgatcgagaaggtaggtgtctatgaccaggatgctgtatcatttttgacacaatgtccttctaggttggatacagtgcagatatcctctacattgcaatattatcctcatcaaaagcgtcaacggcgcttttttaccggacgattactctacgtagctcgctatggatgagctatgctcttctctcggttactctactctgtgcccctgttactatagttttgctggcagtccgctgtgatcgacatccatggcatgatatcaataaccaatgttccgccttggtaggtcacaatacagttagtactatatctctactaactactagctgtctagttccctcactggcaagccgtcacagctttggatatcatttttgaaattgtgctgttgctatatcccatccgggcaatcgtgcgactgcatacgacgatcaacaacaaagtcgttgtaattctggtgctcagttgtcgagtattgtatgtttaagctctcactctaccagtttctacatactaacaatgggcatacttgcagccttatccctatcagcgccatccacctccattacattcgtcatcaagtcaattcatcagatcccacactcgaaggaaccttcgcgaccgttgttgcagagctccacgcggcacttagcgttcttgtactcacagcgccgttaatgaaaccatttatcgcagcctacgtcgacgagaatggactagcctataccgacgacgcgtctaagtcacgaaccaaccagaagctcacacctaactccaaccgatcgaactcaacatatccttcgtcgcgggtgagtaattctccagcgaaaaatcgcatcatgaagaggattgacatatcggtggatcgcgaagatgtggagcttttggagagacgatgacgccctcaacgggaggcccgagttactatacacttaatgcattcacctgataggacacagtcacatcgcattatgctcaatatctgccggctaagttggtctgaatgaatatgggatcaggctgtaatggtttagcgcgtagagtgggatcagcacccattccaatacggggtaacagccagatatatccactttaggtgcgatgagtctaactcggatataatcggacaataccccatgtggaacttgataagggcaacgttccagtatcctggtgatagcagaagcgaatcatggtctcgttaacacgagattataccactaaatcgatcagcaagggtagaatctccatatcgggatatgaggtggcggaatcaagctaaaccaagcgtttgcgtggatcaattgcgctagattcggcgttttctagtgcacgccattgctctggccactcagtccagttatagatctttatctcaccccgcgaataagttcattccaggttatgacatcatcgatctacagtctccgaacttatcattctgttctctcacatccaggcactggacttttatcttttctcctgatcgctgacagtgatcgcgatcgctaaaagctctgaacagcgaccccagccggtgcgatggcagattatcgccattatcctctctcaaatgacgtcgacaacaggagttatgctgcagagaaagaagaggagaaccgatcgggggatgtgatctctcacctcgcagacccatttggggatgaacatgatgccgaaattaagtatcggacgttacaatggtggcaatgcggcatgatcatgatcgcggagaccgtctccctcggtattctgtctcttccgtcggctgtcgcagtcctaggtctggtgccgtacgtttctactacctctgatgcacagaataggaatccgctgactgctttccagtgcgatcattcttattgtcggactcggtatagtcgcaacgtacactggatatgtcatcggccaattcaaactcagatacccgcaagtacatagtatgggagatgctggcgaggtgatgttccatcctcttggtctagctcgctttggtagggagttcttgggaacggcgcaactgctttttctcatatttgtcatgggcagtcatatcttgactttcagtgttatgttggatacagtcacagaccatgggacttgctcgattgtatttgggatcgttggcttagttgtctccttcgtttttgccttgcctcgaactcttcgcaaggtttcgtggttctcgtttgcttgtatgtatatccaaatcttttcagaaccagcccctttctaactctcacagccttcgcaagcatcattgccgcactcctgattactatgatcgctattgctatccagcgccccggtgatggcaaagtagatgcgactacaacagtcagcctgtcaaaggcattcttagcagtgacgaatattgtatttgcttatggtgagtactaatcagctaccctgaccttgaaactaatctttatctagctgggcacgtggctttcttcggctttatttcagagatggagactccaacggactatcctaagaccctctacatgctccaaataaccgatacgagtatgtatgtgatagctgctgttgttatatatatctacggtgggaaggatgtgcagtcacccgccctgagctcgacaaagccaataacagcaaagattgcatatggaattgccattcctacggtgcgagcctccagcccatgtttgatttatgcagcatcctaatgtgatattatagattgttatagccggtgttatcaacgggcacgtcgcatcaaaatacgtttacgtccgtcttttccgaaacacaaatcacatgaagcagcgcacattcctctcgatcgggtcctgggttgcgatcagtcttgtgttatgggtgatagcctggattatttcagaggcaattcctgttttcaatactttgctgagtctgatcgtaagtagtcggggattgcatgtgacacctactgacatggattcatttattagacttccctttttgctagctggtttacctgtgagtgatattcggtacacaaactgttgataatgctaacctagattaaagatggtctgagtggtatattctggctgttcctgaatcgaggccagtatggggcgtcctggaaaaaaatggttctgactgttgtcaacctggtggttatcgggattggtgcttgcttggtatgtcaaatttcacaatgctcagacatttttcagactactaatattcatgaagtgcggcatgggcctttgggtttccggtaaggcaatgcacgatgattccagtggtgccagcttttcatgtgctgccagaagtggatgaaccctgatgtcctgatgttcatgaatgtctgcaattttttacaggtataatttggctttctttttagtgaatttgaatcattaatatcaagatcagtgttattctcggcctgcgtgttacttacatttaaatcatgtgttgttcgtgtattcgaatgatatatatccacctccaaacatccattttccgaacaaaggactgacgcaatattgaaccgcctgaatatgtactgagcttgtcgaacttccattcgaaaatacgcaacgatgtcgttacctacctacatcatgcatgactcagcctagcgtcgatggatggatgggtgccatgacgttttgcaagatcaaaaatcatctgttgttttagaatgtaaaaaaaagacacagatgagttcgaatgatcgatttctacgaaactggtgtgcttgcatatatgaacgggctcatagtgagcttctacccagtgctcaccctcgttgctaatatcagcaacgaaccactgccctcaattatcatcctccgttgaatacgcgagtcagattatttgtgatgcccagcaaggaaacccaaaccttactgtcctcgcacagcaatcaatcagagcgtgaatcaactagcttgcagaccgtgttcgacgatggcgacacatacgacgtggccgatgggttggaaagcaatgggggctcttcgaaaatcaagcccgagagatctccaaatgagaaagacaacctgatagtggactggaacggcacaaatgatccagcatgttgtccgattcccctccgagtatacaaggttcctctaatacaattttaggagaagcccaagaacttccccacgtggaggaagtgggtgatcactatggtgctaggaatgatgacactctgcgttacttttggctcttcgatcttcacaacagcaacgagacagacagcgacaaagttcggcgtctccatggaagtcacgttgttggctgtcagtttgttcgttctgggcttcgcctttggccctatcatctttggccccctttctgaactgtacggccggaagctaccgttgtttctgggcatgttcggcttcgcaatcttccagattcccgtagccgtagccgagaacttgcacactatcttcatatgtcgctttctgggcggaacctttgccagtgcacctcttgccattgtgagtttatttcattatttccaagctgcgcatttactttcgctcactgacttcctcctccttaggtaaatggcattttggccgatatgttcgagcccgtggagcgagggattgcaatggccgtcttcgctgcggcagccttcatcggcccggtagcagggccaatcgtcggtggattcataacaatttcatacctgggctggcgctggacagagtacattacagctatctgggcatttgctatctccagcatcgggatcctggttgtccccgagacgttcgagcaaactttactcacacaacgcgctaagcgacttcgcaccaaatccaagaactgggctcttcatgcgaaggcagaagaaaaggtagtcagttatcaagatattgcagtacaatatctcctgcgcccgttccagatgcttgtgcaggaacccattcttctgcttattaccttgtacatgggtttcatatatggctttctgtacacttgttttgtggcctatccggtctccttccaagaacagcgtgggtggaatgatggcattggagcgttgccgttcgttgctttcatttgtggtgtcttttgcggttgtttgattatcattgcattttcattgacgcggtatcgaacgttcatactccgcaatggccgagttcagccagaggagcggttgattcctatgattattggaggtattttgttgcccgtggggatgttttggtttggctggacgtcagatcctcacataatttgggttccacaagttatatctggggcattcttggggtcgggggtattattgatcttcctgcaggtattattatccctattggaagatgaataacattttacaaatacttacgatactcgccaggggctgacttatatcgtcgatgtgtatccgatgtatacaaactctgcaatggcagcaaactccttctttcggtcatggctgggggctggatttccgatgttcgcaccaccattggtatgtcatgtccctctattagcggcgcaattcggctaaccgcaatacaacatgtagtttcataacttgggcgtcgactgggcgatgactttgctaggttgtctgaccgtcgcgttgttccctgtgcccattgcgtttttcatatatgggccgaaaatacgctcatggagtaggtttaccatgaaggaagaatgaaggtagagctgtgagatattcagggccgatcgagcggagtttcatcggacataggtcttatatcgtgatatctgtgactggtcaatataggatgttgatatagactgacataatattatcaagtgaacatcgcaacatcttagtattcgcagctctagaccggaggagttatcaggccctttgtcgttattatgcaatttgtatgaccaaagttaacgagccgttactccgaacatccgtctcggctagaagttgcaacaaaaacgacaaatatgtatgacaagcagttcgtgttatcgcggcccgaggcataaatagtcgctaaaatctccatcggccatgtccgatgtggagaaaactgtcgcatacgaaagagcgaccttgatgctacacggtcgagccaatccggtagtggaaaccttaccccagcttttcaccagcgccgcagagtttcagctaagctcaatggcgcaacccatgcagcttgaatcgtccatcaccacatctcgtgagggggaacctggggaaaccaagacttttagctaatattatcctcccgcttcatggctctcgagcatttctactccactcttctcgaagacttggtcttcggttccacactctcgccaatgggagctgcgcttcatcgatccggtctgcgccgccccacgcactgctcggttccaccaatatcacgatcgtccggtgggcggcgttcgccgtccagtactcagatgagtgtatatatgatctttatatccaacctcgtatcgatttggcggggaaatcggtgtggcttgacctccaaaccctagatcttcaattcgtctctatccgataccaatattgcaccatggcgccatattttggcctccgtggcccttcgctgaatagggctatcatgtggttggtcgtgtgtccggccttcgtgacttatggatacaaccaaggtgtgatgggaggtctgttgaccctggaatccttcgccgagacctttccgcagatgaacactctcactgcaaccgccgcacaagagaagtataactcgactattcaaggtaagcttcatcactatacctggggcacagatcggtcccaggcccttggcacaccacttggcctgtttctcatgctgtatacttgcaggcacggtagtcgcactatataccgttggtggaatttttggttcactatcatgcattcaattcggtgacaggctcggccgccggaaggtcatcctgttcacctccttcatttcgataattggcgctgtcttgatggcaacgtccttttcacttgcacaatttatcgttgcacgactcgtcctcggatatggaactggcggttacgtggctacagtacccgtctggcagtccgagatctcaaagcccagcaagcgtggtgctcacgtagtaactgacggcatcttcatcggtgccggtatcgccttctctctctgggtcgacttcggcttttacttcgttaagaccaactcggtttcctggcgattccccttggtcttccaggtcctgctatcactaatggtcatgagctttgtgatgctcttccccgaatcgccccgatggctgatcaaaagaggtcgcagcgaggaggcgcgcgagattttggcggcgctggacgacgtcgaccctcattcggaacagatcactctcgatattcgcgatattgagacctccctagctatttccggaaccggttcgtggaaggatatgctgaagatgggcgagcagcgactcttccatcgcaccgttctcgcctgtatgggtcaaatgtttcagcagatgtgcggaatcaatctaatcactttctacgccacgaccattttcgaacaatatctcaagctctctcccatccagtcgcgtgtcctggccgcatccatgtgcctaacacagccgctgggcggcctgctggcctattttaccatcgaccgtctcggtcgccgcgtgctcatgctgtggagtgctgtcgggatgtcaatctctatggccatcctggctggcaccacttccgtccaagataacaccggcagcttggtctgcgccgtcgtgttccttttcgtcttcgaattcatcttcacagtcggatactccggcttgaccttcctgtacgccacagaggtcgctcccctccagtgtcgagcatctatcagcgccgtctccgcggccgccgtctggacttttaacttcctcctcgctgaggtcacgcccgtcggcttcgctaccatcgactaccagtactatattatcttcgctgtgctgaacgccgccatcgtgccgactgtgtatttcttcttcccggagactagcggccgcagcctcgaggaaatcgatgagatcttcttgcagtcgcgcagtatattcgatccgcctcgcattgctcgctcgcttccccgaatgcacgttgccgatcctcatgggttggatctcgacgccaaggatgttggaagcggtgatgaggccacgggcgagaagcccaaagtgtaaactattcacgaatatatgaaatgagggtgctgcttgtttagcgggatatgtaaatagaattcccgaccgtgtcccttgcgaccggtcattatagacttatcaaatgatgcattattttggttgattattttttatctttcatctatagtgaaacaaccggtagattgacgtatcgatccgatgatgcgaccggtgtttcgctcatacttggcgccgtttcaggctatgctgcagagtttcgtcattagacacaagaatccttatttccgtgacttatttggagagacgccttgtcgatcacatgcaagatatcaattgcgccaatatgggatatgaataacgtgaagaaaaggaagaaaaattaccaggttagagggcgtttgaaagtggccaaagtgacatccgaaggaatctcaccagatcccgcattagtgattcaaacaagcccggtttcatgatctccgtggtctccgtgttatatttggcgggtcttgtctggcggtacaggtatataacagcgtttgaaagggagtcattcgtgcttggaaacaatacggtcgcgatcgcacctcgaattcgccgagtataacacaaactcacgaacatcgaccaaatgtgttttattgcatggctcgtcgccctctctggagtagccgaagcgggcgaagtcctgtggagcgggttattcaacgcgtcggcgacggttgccgactttgacgaatgtgagtgagtttcgcgagttgctgtcgattggtactgacaagcaaagggtcatggtctaaccaagtcggcgcttggcagtggtatattcacgggacagcatccacggaccagtatctgggtctctcgcctgatcacaagaacccggccgataccagtgatgaacagggcatccggatcacaatcgtaggtcattttatctagtctgaaggacgagaagctaatagcagtcaggatggcacgtcgttctggaatggacaaactatggaacgatccgagatcattcctcagacaaaggcggatcttgggagcgggcatctgttctaccatttctcgctgaagacagaggacacgaatgcaccaaatgcgagcttcgagcatcagatcgcgttcttcgaggtatcactcccagttccacggtatagaagaaaccaacagctgacgattttccgaagagtcatttcactgagctcaaatacggcaccctgagcggcgcttcgggcgaagacaacgcgcttcgttggtacgtcggtggggtgtcgcactgggaaaccgacctgaaagcagggcagtggtacaacttcgcgtacgatatcgattttgacgcgaagactgtggggctgtgggcgtcagatgggtccgatgacctcacgcaggttgtgtcggctgtcagcgcgtcgacttcgacaaattccgcggattggcatgtcggcgaattgaggctcgacaatgggggcttggatgcagctgccgaggattggttttggtctggcatctttgtcgaggaggctccgatcacgtctagtattgcaggtcctgcgtaagacgtgacttcaactctatttggaatgcgttgtttgatcgtattgcaatcaagacaaactacttgcaaacatgccaaacctgtcaaacagccttggatttatgaggtcatacgtcgaacaggacaccgcttttggaataactctggaattgatctcatgaactatgtcgtcgtttgaattcgtttaaaaagtacaaaaaaggtttttaccgcacagtgtatccaccgtcaatgcgcaaatcgttgcccgtcatgtagctgctggcatcgctagccaggtaagcataagccgccttcagctccttcgcatcaccattgcgacccatggggatcatagagagccaaaggttctgaatatcctggggaacgaaatcagacaacccggtgtcgatgtaaccaggcgagatgctgttgacgcgggcaaagtcgcgccattcattggccagcgaccgggcaaggtgaatctcggcggccttggcaacgttgtatgaggtctgttcctgggggtagttgacaatgtggcccgacatggaggcagtaaggaccaagctgccagttccgcgctccttgaagtgtgcgcccacagccttggcgcagtggaaggcgccgttcaaatcggtgttgatgaccttgttccagtcctccactgatccgtctaggatgccgctgtcggctgtacgcccggcattcgcaatgaaggagtcgatcttgccgaaatctttgatcacctctttcacaaggccttccacgctctcccagttgcccacgtcgcactggtacagcttgaccttgacgccgtaatctgctgcgagttcctgggcgttcttttcgccgccctcccggcgggaggagtatgtgatagctaggtcggcacccagctcggcgcagccacgggcggcttcaatgcccatgcctcgagccccggaggctcccgttacaacgacgaccttgcccttgaggctaaggaggtcaaggatgtggttggctttggggacagggataggcatattggtaggtatagggtttcggtttggaggttgagagagatatgctctggtagagggtttaggtttttgagggtataaatgagaataggttttgagttgttatagcttattctcgacggatatcaagctgggcttatatatgtctacatccctctaatgacttcatggctctcgctctgacatgagagagccctacctgggcagccgagcaggtacctcctgtgcccggcttcatcaggttatgtggcttgctttttccaacttggcatatccaataatatcatcgaagggcttcgattatgacaatgttggtggagaaatttggcggggcagtgacatcatgagccgatctggtaagccgggagcagcccgaagtatcaacttgtttgatatcattgagtttttgagattggcaatgacaccggagttttacgaaccaattccaaataattctagaggggtctttcgagattatcgctcgtcagagcatatcgaagctatgagatgccaaggcggagtagcattgtcaacttagaagattccgaagtacaacggtactctggcaatccacgggagtaatagagtaatacgatagtataaaagtataaaagaaaggctgtcgacaaagccgtcaaaggccatcaagtcatgacggagacgacaaggtgcagcgaattagaactgcgagccattcactaagaaacaaaagtaatcccccggccacttccagacccttgtgtaggaaatatttccccgcataggaggtcaaggcgaagaatccctgccagtccagtccgtatacatcgattgtagcgagttccctacaccataacaaggccggactcttgttgtactattctgtatataaccttagaagtccactgcttattaaattcactatttaatgaacgtgctaagttgactcgcatcatacttaattgcctaggctttatcccattgtttagtagtctcactgcttcggctcttgtgtcttctcacgcacaagaccctcctgcgactcagaaggccgaaccgcatagggatcgacaacaacggaggcgaacttgtttgccttgaccttggtagcaaacagaatatccagttccgcataagtgcgacctttagcctcaggaaggcggaagaatgcccagatgaatgcaacgagtgccgtggcaccccagaagaacccggtcttgccagaagcgttccaggcggtcgggttcatgaagtatggctctagcacctgcgacaccacgttgatgatctggtatgctgtgcgcgcgaggcagactgtcaacgggcgcaggcgcacagatgatgtctctgatacaatggcgtatgcgatcgggccgacagtcagggaataggttaatagccagaagaagcagagtccggcttgcgcccacataatgccgttcgcggatgatgccacgtccaggataccgatcaggaagagtgttgcacaaaggattccctggccccagacgtacagcgtgcggcggccgaagccagtgatcagccaccaggagaaacaggtcccaacaaaggcaatggctgtgcactcgacgcccagttggaacgagcgagttactggcaggccagcttgagtgaagaaataggtaggtgaataggcgaatgtactaccggacagaatctgcccgacgaaggccatgcagcagatctcggtgcggcgcagatcaactcctttgaagcagtcgtagtaggtggtgccagctacaatctcggattcgagcttgatcgtgtgcaccatcatcgccagttgaccgttgatctgctcttcggtcttgctgccgcccagtcggcggatgttgcgctttgcgtcttctagacgatcgtgccggacgagccaccagggactctcgggtgcgagccaacaaaccaccatcaaaggaagcggccaaatccattgtaggccgaagggaatgcggtagccccattggtcctttcgttcgacgagtccgtagaggactccggatgcgatgagctggccgatggcccagcacaagttgacgtagatagtgaggtagccgcgcagcacggtggggcatacttcagatgcgtaggccggcccaatggtggcgaacactccccatgagagtccgcaaaggatctgaccggtcaagaggactgccgcagagttggcgaagaacgtcatgaagatcaaggcattgaggaatgcaagggcgacgaacattacaattcggtaaccgtacttggacgcacagtatccgttcaatataccgcctgtgatcatgtcagtgttcgtcctgaggtggtagtcgacagggaaactcaccgaagatacatccaaccgtactggccatgttaaggcccgtctgccaaggtgcagatacctgccatccgatagtaccgccataatcttgtccatacttttgattgaacgtggggtaggcgaagaagttgcccatcaggatggtgtcgtatccctccatgataatagacatggatatcaagacagaccacatcacagccttacggttctcgcgcaaggcctgcatcagagtctgcgtgtgctcatcttcggtagcttgcttggcctcggtgatggcaccatggcccagtgtgtcttctacatgattggcggcggtcttttccaccgcaagtacagtatcaacagcagatgccatgatgggcaattggacacagatagcggttgatgttaaccagctgtgctgtctcacaggatcccatcaagtctcataccaggggggactatcatctatatacaattcgcgacatctcagctgccaggacgatccatatttgcattagcgtgtatctgaggttgtggagaaaggaaaggtaattcagcgccggatcaccagactgcggtcagcccacctggcattcaggctaattgttgtgatggatagagtacggagagacatttctgagtcgtgcaatattcctgtcactgcgtctagaccaactctggattgtcgcacatgagggcgtgaaattcacacctatcggcaggaagaatatcgacaggggcaaattctgggattcaattcagccgccagtggtctttcctggggaaccgaggtttgggaaggcgatctgattggagaccacttagcgctaactccctcgtaatgtagaaaatgaagctattcccttcctgtaacggggaaaacggccgcacatacattttagggaggaatgccgtagtaaatccgacccttaatcaagcctattttccaattggaacaataatataacgaaccctgaacggtgttttgggccgtagatgttggcgagctccctgttggaatggggtagttgctctgggttggatcaacttgaaacttccggtcatccttcgcgcctatatttctttatgacattttacgttcaatcttccgtcttcaatcttcccaagtaggcgactcatgagtatggttaactcctctagccaatcagaccagtgtggtgatccaaaccaagtgggcttccacgggtaataccggtgtagatgtgtagtcttacggcagattttctgacaaggtgtgtaaacaagctgaattcgatagctgtatggagtgcaattgatgcacagtgaatgatgaaagtgaacaaataggtttggttgaggataattcaggcaggcgatcacagatctgatatgttaggaaggtacgatgggtaaccattccctcaacctcgagatgccaaggtatgtgctcgtgttcgaaatacgcggcatttcactgatctatgtcgcacacgacatgattttccttaccgccaccatcacacattagaatctcaggctcagaagcggacaaagatggtggaaccttgatctcgccgactcaatcactctctacaacagatcgacagctgcctggaagaaacgatctctttgtcggctctttcggcctttaccacgataactagcccttctgactcgtcctcaaactccaacctcttggcactgtgccagcgatttcagcgcgacgcagcgaaaccactagtatgcatatacgggggtataataacaggaaataacaaaaaacccaacagcaacaccgatgcaataagtcaacgaatacccaactcaactcccatcaatccgaatcaacgtcctaaactcattgttccgaatcctcgtctctggaatcatcaatcgcataacccaataatgcttcatatccgtgatgctcacatccctcccagctgagtgcacactccaattcgtctgatttttcgatccgagaaagacgccttcgactggtatcccacgacggtagtgtctgtatacctgtacaggctcagcgtttggtttgccccagacgagtcgtcctgtactggggtggtggtcaatccccacggcgtgccattccaaggcgccggcaccgggaccggaaaggacgtatgcttcgattttgttcaggacaccgttgcagcggagctgggttttgaggttgttgttgtcgcttacgattgtgatctaaatctttgttggttatttgttccccttcgtcggttatgttttcatgtatggaacaagtccatgcaagggtagcaacttacaaatccatgctcgatcgtgttgggtctgtcttctcgtaaacgtatgatatcgctgccagtctcaaagccttcgatgctgcataaccctcgagtcgcagttccattgtagcagctgtcaactttgagtgtccaaggcccggctatctttgtctcgttgttgtacaacggtagctgtgagcagtctgtgacggactcaatgaatggccctcgcttccctggatgtgcaccagcgagtagaaatagacacgcgaatacaacactggtgatcatgatgactgtaatgaaggagagtacaaaagaacgctgagtgtttgccatgttttcgtacagagaacgtgaatctttatatttctgccttcacggcgccatgttacattcattttcaatccgtcttctaagtgtaacagctctgagttcaatccagacaccgcggttctctatttctaggctgcaactaaccaagggctggtgttattgatatcagcccacttagcggccaaaatagacgatttcgcgtttcacgattggtggcgagctgagcttctagggcttctttttccaattgaaatgtttcattggacatcaaactcccttctccacatagtgtatccccactgcgatcaaaaggcttgacttaaaaagaccctgccgtgtctttgatctattttggaccctggaattgagacactcgctagaattttcaaaataccgttgcattgctcgccaaatcgagtttttgttgaagggtttgaaacccatcattccaagtctcccgtccattcccaacttcatatatattcataatctatgtcataaatatctcacgatatgttctagtatacagtctagtctactcacgagcaagaagcccttcggcttcctgggcgtactcggcgggcccaccatgtgacttgcccagggtttcagccatagccaaaccttcacgccgacccttgtccgcattaaccatccacacaagggggataggcagaaggatcagaagcgccatgaagaaaaatccacttcggatttggccggtcgcatcaacaagaacgcccacaatagccggcccaatgaatgagctgcccttgtccgtagcagcgtaaagagcgtagaacgcagcctcgctaccgggtggaatcatgagtccgaagaacgatcggcagtatgatgccagtcctcccgacacgactccgtggacgatggccagcgggaatatctcccacggctgttgtagcccgaacacaccccatttttttatgaaggggatgtaagcaagcaacccatagagtggtatcatctcaaacatgccaatgcataggatgatggtttgattcggccgtaggccgaagtaccgagatacatgtggccataggaatgcgcccgtcatgccggacaccgtcgcagtgatggagagaagtccgatcagcggtgtgctcagtttgagttccgtccgcgcgaagaggatcgccgttgcagagacagtggccattgcatcggagatcaggaaccatgctacgaggaacatgaggacttcgcgcagtttgatgactattttcacggtctcccatagtgatttccaggcaaaaccgatcagtcgtagccaggctcgccatcttgctgtgcctttggtggcgactgaatccaagggaggccccggtcgtgtcttgagcaaattacgagtgaccaaggtgaacccgccccaccagatgccgaccaggagcaatacgaagcgcatgggaagagtgccagacactttcacaagggaggtcttggataatgtgatcagcaggatgatactgatgatttgcacaaaaaccgccgcacaatatccaagaccaatgcctgtggaggagattttggtggaaagctgcagctccggggaggacgacggcggggccttggcccctagtccaccttctagtgagctccgtggctgctcttgtggctgaagtccgtctaaactatcgttgtcggcatcatcgctgccccaggcgttccattccgagttacctccgtctcgatcgaagctcgacatttccgcgctgtcatccgcctttccctcttgcagagatgggtcgttggcgacaagcacagggagataagagttcagcacaacaaaggatgaaccgaggcaggtcacaccgatgacgaccaatatcgatccgataatgaagataggcggcgcaatgaatatgaacaacatgctggcgagcgcaccggcgaatccgaataccataagtaatatcttgcggttgttctctatacatccaattggacaaatttgacgttaactcatgtccctctttcgcaccaaacattctcagtccggcgttctgcaaccataccgtaatccgccagcgcgctgaacgatatcagtgtcagcgcctgtatgagtaccgctagcgagaaggtgtacatggcgaagctagctgtattgacctcggcgccaaagatcggcaccacacattggccatgctcagcactatttgtgctgttccctgtggatggtccgacgcatggaagacggctcacttgcagggtgccgcgctcgcgggctaattgttccaaggtgagcggtaggaaagatcctggtggcgatcgataagtaattgattattttaggtttgcagatatgtcttcacgaacctacgccacagaccgcgaacacctccgccgcaatcccgtacgagtaccatcctaggatctcccggcggctcgttggggtggtatcttcaccggcataccgtggtggtcgctgctgtacgccttcctctggcgacgggggccgaaaggcagcagatatataggatagcatggagaaggttgtgtaaattctcccccaggaatccacaaatttacaagcccaggtacgcgcggatgcgggcggaagagccccaacgagcaacattgttgatgatgtcatcagatcggcaggatatacgcctctttgggaatgtcttcattttctataacaaagtatatggtagatactccgtacactgccctataaacatacaaagaagagccataaaacgatgaaacacaatatagcgcatgatcctcggaataaaagataacctgcccatagaacgggctgaatggcgatgagttcatccgaatcccgaatcgaatatatatatctcagaaggcctttgagcctgtcctctcatgatatatttccgatatctctgcgatctgaatcgatatcctctctaggtaggactgaggcgcaatattactaagttcggcgacgtcaacatgcagtcacatatactacatatatttaaccaggcaacagagtagtgcacaacgaatttcacgattatttcaaccagtcacccgtcatcatgcctgcttcggtgttcctccttggtcccggctttgtaggcggagaaatcattgactttcttctcatatcgaactacaacgtaacaacacttgtccgtcacgaatcagccgtggcagattacgccaatttaggcgtcaaaaccgtcgtgggcaatctggacgacacatcagtgatcaaggatcaggtcgcagttaatgacattgtcttctacatcgcgactgcagatcacttgtcatctgtccaagcaataatcgatggcatcagacaacgagcggcgcaagggctgcaaacaatatacatccacaacagtggagcaactttgctttccgataacgcccaaggagagtatagaagtgatatcgtctttgacgatgagcaacccgacgaaatccacgccctccccgattctgcaccgcatcgcctaatcaatctagtcatcgtcggagcagcccaagaattagcctcctacgccaaaatagccatcatgattccgccccttatctacggcatgactagtagggaacaccgcctgtcgattcaattgccgacgctcatccggtattctatcaaacatggctatgcgggtcagatcgggaaaggtctcgcagtttggagccagattcatgtcagagaccttgccagaggatatatgattcttcttcattggatagagagtgcacccattgctgagattgcgctgaatccgtacttcttttgtgagaacggtcaagagttgtcttggggtgaatgcgccgctgcgattggccatacactcaggaagacagggtgcattactaaatctacgccaaagcccattccgaaggaaaactgggatgatttgttcggggaatattctgggatggtactgggatcaaatgcacgaattagggcgaatcgacttcggaaattgggctggacacccttggagacggacacctttgcctccttggctgaagatgagattccaattatcgcgaaggagaccggggagttcacagggtatgcgagcgttgttgtgtcgtaactggaaccactcaaccgctgtgttttgccgtcgtcctgtatcacttgcacaagtaattaagactaaagacgtgctttggcctcgctcgggtactttgaattattacaaggcttccaaagagtaagatatgactgtctcaacggatttaaggatcgggagagaggcaaatcacaagttcacagaaaagggaagtcgagggacgacagtcgcacttgccgattccgggccggtatagggtaacttcccaatcgggctgcccctactcttccatgaaactcaacatcaagacttttgtccttccttcatcttcacacaaaaagacttcatatctgcagttctatcaaatccatgtgctatggcgattctacattatctcgaattcatcattggccggctactgtacccaattcgtggccatgattcaggccaaatcattcaatgcccggccttcaaagaccttcccgagcccaacatgaccctcgaagcacccgaagccggcccctcgggctctaaactacctctccactgtacttgcaaggccgctgatggcaagggtggtcttcctgaactgcgctggacagctccaagctgtcgcgaggaagtcaaggagtatgtactcctctgtgaagacctcgatccaccaatcccattccttgtctttcaccacggtctcctttgggctattccaccctcgaccacgaaagctgaagcggctgatgtccacccggatgatcacgccaagatctcccgcctgaccgttgctggttggcgctttgtgccaaacttgcttggattgccgtttgtcggcgctggtgcaccgctcggccatggaaaacatcgttacatcttcaccatcatcgcgctcgatgagtctctcaagttcacggctcccgagaaggtgacaaagaaagatatcaagcatgccatgatgagcaaggtcattggatggggacagtggattggcacctttgaaaagccctggcccaactaaatcatcatcaataccacttcttttacaaacacaactagtgtgaaagggacatcaggagcgggattgacgaaggagtccaaggtacttcggcagtgagtgtgtatctcattcccttacatttactagggttcttcatgtaagtatcgttatggaactaattccctaataacaatttatttttcggtcatgattgttttcaattctgttgtgcatttccaactaatttgtgcaatggtcaccagttgtagtccaagaaccctaggctagttcacaataacgtgtgtcatagctcacgtcagagcactttatattatccatcccagacacctgtttgcgatgttcccctgatgatgtcccaaatgtcccaatcgaagagcttctaaaatggtcagtcttgaaactcttcaaattctgtgcgagccagctgacacactgacctttaccggtgcaactcaacctatccggggagtttcgtgtcgtctattctgacctgctcattggtaaatgcagtcatgccaatccaataatttgccggaggtttttatgttcataatatctaccagctgggtgatttctcaacgattgtgtatatttatatacccctttgatcgttgcaatgcgagtaacagtcccttttggtttcgacttttgtcggcaatttccagcatgcgaatttctttacaaaccaactcaatcatcatcactcatctaacaattgctactactgagtgaccaccggaaatttagaatgctcacgagctctcgggttccattccacgtcttaatatacacacattttcaaccagcgatcactcaaaaattcgaataatcgactgcagccgacgatctgtctcatttgccatcaccaggtgccattttgaaggcgaggcccagtggagatcttgatggatgaaacggacaataattgacagatgagacagacagcggcgcatttggctaatgtcctcttctccccacacagaacaaacccccccttgtaccgaggtggtggccaatttggccctcaccttcaacgcccgtgccgctttctcaatcgccatgactaataaggtgagaatattagccctggcgtttgaagcaaaacatacttgacattgaaggatgaccactccctgttgctgcaccctttccaggtggagcaatattttattcggcccattcacctcctccgattgcatgacttcactaaatgcctgggcatagcaattgcagtgaagggaagaagcgtcttccggcagtgcctcaagatcaatatcttccagtgggagagattgactggaatcagtatctaccggttcgtgccagatttcactggagggcaagtccatgattctagccggattccgtactgttccggagacctgaattgcgttcggtgcgaggctgaacgggtaaattgcaccaccttgaaagagtgacccagactggatgtccggcgcagcggtgtggaggaacccttcaatggggggttcatcgaccatcaaaccgatgtgggaagtataacactgtgtggaatagtcaacacgcccagaaaaacggggacccccagaactttcgaatccgtcattttgttcaaacgagctatccgggctggtatcggaaaatcctggatccgcgcggttttcggcctcgtggtcctggatcccttgtccaatcttgtggtttcctgcgcgtcccaacggtcatctatcgacatctatatatactatggactaggtatgtgctcacctgcaacatccgagagcagatttgtgaaactcgaccactgaaagtttccctttggtggtgtaacttcagtgccggtgctagggtcgctcttgtacgactcttcccttgagctaggacccgagccggatgatgtagttggactcgggatccgactcgggaccctgcgcgccctttgcgccctctcttctggggctagcctcgtcggacggtcaactccctctacctcctttctacgcatcttgatgcctgtccctgctgctgccggccgaatcatctttctcttggccggccggcccaacggctgcgagattgaatagacacattgatacccatgactctcgcaacggtcacatgggtaggtgtggctacatcgtatcttcgcttgctggcaggcgttacaggttgtgcgcatcttttggttgcgaagtagttgaccgttggactggagagacctcttggtagaggtctcagccatgtgtaaattgtggaacagatgttgaaaggtttgtccgctcggactcctcaatcaacaagtatgattctccctggtcttgggccaacttggggtatttataattcatctcatgatgagttcacccacctctttcctagttgatattgaatgctgtcagcaacacaggaccacgtttgattgcactcccgcattcatcacgaaaggctgtttacccacaccacaatgacctccgtttacagcaattgccgaaagcacaagaagttacatggatcgaactttaccaatgacaaataaccttgtcctaccccccttgggacctgtgtgcgagtaccacgcttgtagtctgtgggggtgttgactgttcaaggatcaccaactttacctcaccatccatcagtgaacaattgaagtggtgacgtgaacttggggatttctttggatgctaattgattttagtaacgccgtcgtacggtattcacatttcatggagctaggatgcttccttacactagaatcaaacccgttgttgcacacaaaacagctgtttcctttctcgggcaacgtcctattctagttgctgcgtcgaacaactccagatggaaattcacggccatcattgaacaagaggcatgaagccgaactacaatatatgctagtcgatcgaggggctttcccataacagcggcatctatcaatcgatctgtctgttgacacttatttctacggcgttctcggagcatatgctcacctgataagccagttgcttgcgattcttatataggcacaacaattggtgcgttattgcggccttgacacgcatttcttatttctgatatgaacattttattacaaccatccacatctaattttctgatatactatacgaagtacgttgccaattgttctccaataatttggttgtccgatctcatttcaattttcgcagacaatatatgttccctatagtaaaagcttcatctttcacctcattatagctactattaccattccagataccaccatgcctgccatcaatccatccacccaccgtcaatggtggcggcagctaggttgatggcaggcatcgtggtaccaggaatcgtaatggtaggtataatcaagttataaacgaaccttttattgcttcgtataggggacatgaattatcttcagataatctatttatatattcaaaaggggaccttgcaacgcggacagcaagcgtaccgacagccctgcctgcgaaacagatgtgagagcatagtcgttactgggaataggaggggcgagagaggaaaacaccatagggaagtgaaaagtgtgcctcggggcttgtttttaatcctgtactattaccaatttaattatatggcgtgacttgattaaccctggtgaattagccctagctatatgatttcatggggaattgttgctcagacccccctgccttgaatttcagtaccgccttcctgatcgagtaccactcagaatgttccggccacactttattttttctgccatgtattctgcctacttctggtttacatagtaaaaaaacatgcattttgattagaaaaatcgtatatactacctgatttctataggaattagctccttgatgaatgagcagttgatgaagcagtcaacaataaagcagttggtgatgaaatagatagttgatacaagagatgacagaagtgactaaattttgttaggagtttacatacaagctgtaggtacctgctgctgtcttgctctatgtatcatatgcagttgaatacaaaaggaaggcggtactattcaggcagtgggcatccagggtgcaagcaaagattgggttagaccgctgtgccgacagtatcttacaatgtttatgtttccagataatggagagttccaaaaatagcaccttcgaaacgtggatcatattctcaagtctccttgaataaataatctcagtttccatgtccccatgcactatctcatgccaccaatccggctgtgctcgtgggacaatccacggaacggaacgaggtcgttgtcgcactgtcaggcatggtggttgtctctccctcggcaggttcatgtctgccaatgaaatagttcatagcaatgggagggctcaaccctgctgcctgaacaaacttcctgatatcgaatccggcacgtgcgctaatagtcttagggaacacatgtgcaaagcaatccggaaattgataggctgggggctgcgcgaaaaggagatagacgtaacgatgatgcgtgtttggtggtgcacgaggagctatgtacgaggctgccgggttatgtctgtccccgtggtcttttcctggaacgattatggaagggggtgacggctttgtacaatccatcattaggtttggctggtaccagtgtagaatgactgattggatatgggttcctggtaggatggcgtcgaggtcgatgaagagggtgatgtatttcttgttgcatccgaggttcttgctgctgatctcgggaatcatgctggcctctgggctgatgttaaattacttgattcaagccgttcgccatttgcatacctcggatatctaagtccatgccaggagtgatccattggcccccgggataccgtatttgcagttgctgactagggggcgaagggaacatctggactatgtctgttagaacaccaaagaggagtgcaagtggtgagatcatattgtgttttttagaatcaaccgaggagagtagttcgacaacatgtcaatcgggaatgcaatgactaaatcaattccactcggccttgtgattcaatttatagacccgctttccacaaatagtactatagtctcccgtgtatagtttgccgttgtgcatcagtttcggcttgtttcttgcgccattcccagcctttcatgtaaacaacacttaaaattggcgtgactagcgcaattgcgccagatacaaaacaatatgtccattggacaccaattcgcttgatcagagggttaactaaggctgcagcaccagctcccaggaaacaccgcacgaggttgttagcggccatcgcggtagcaggggtctcgtagtacaaatcaacgatcagaatgttcatcacgttatatgccgccgtgatacaaaagcaaattacgaagaccacagtaagggcaaccatgagtggtggctttaacggtatgagtactccgtacacgactattgagacagctgcaagtatctgaaaggaggaattaagtcaactaaccaactccaaggatgtctcagggcaacgtaccgtcattggcagaccaatctgcaatctcgcttgttcgataggaaatccaaggatgtcctgcttctggttcttgtgtaccgtctgaccggcattgcgtcgagaccgccggtaattccagtcaactaatactccgttgacagttgcactgagtaatgaccctaagcctgcaggaataaagcatagtccaatacccaaatcatctagatcgtagattctgtggaaaagcgcaggaattcccgccgtgaccgcgtaatagctgctgaagacaactccatttgctaaaagcaccagccccacaggtcggtggaaaagcagacgtagggttgagtatgggttagggacattcaagcgcctcctcggcacacttaatgcaggtggggtcatttcggaggtggtccaaaagtaactccacatggttcgattccatccgactgcagggctcgagccatttccgacaatgcctcggcacgtttcagggaagaatagcagcagcgggacgaagaaagtaccagctgcaatagcgagaaaccagaatattgcttcccagcccagatacttactcaacacacctccaagaatcggcccgattgaaggagcaagaatatttcccagggaagtaaagcccatgtacataccccgctcggcggacgtgataatatcggccgcgacagcggatgcaagggccacggttccactactgccacaactttgaacggcacgaagagctaagagtgctgggaagctgtgttgtagagcgagagcaatgttgccaaataaatatatcacgaagcaaaggatgtatgcaggtcgacggccagcttggtctgcaaatgaccctgttaacattggagagaggccctggcatatcttcaaactcagagaggtcagttattcgaacgtagtttgtagactctggttacttataacctaccatgtatgtcgtgatcgtcagattaattcgagatggactgactcccaagtcctttgcaatggaattcaatgccgggtagtagatattggccgataaaggcgaaaagctcgaagccagtgctgctgtcaaaataatgaggcgtttctgcgttggtgtgaagacggagtatgcctcggtgccagaaggggcacgcagcaagggggtttcttcatcaaccccatcgttctgctgctgcacttgatgaatatcttgatcgttcatgttggttcaaggtagaatgccaaacaaaaatttcacaggattccttctggatgtaatggcgaataaatacccgggtccttttgccgttaaatcaaccgtgaacccaatatcacagcatttcggtgaaggaaaatatatatgcattcaatgcgctcttacggtggaaaaggatcttatttctcgataaatttgataaaccgatatttttcaccagtcttcacaagaaaaagcagccaatgatatcggaataatcactctctcgttacatgttcgaactcttagatcttaggcctggggcccgaagttggctccgcatgacctgtatacagatgaataggtcgaaacagcttgccacgattgactagagcccgttagccaagataccacgccttcagtgaactggttccttacccatgtactctctccaatgtgccatgataccaataatgcggtgagcaagcattgccgccggaatcatatcaggctcgaaaccactaaatcaccgtgttggaacctgcagtcatcgtacacatgtcgcgagtgaacttacattccggtaaatacgaagttaccgtaaaagtccgcattgggatacaagccccgcgtactaaaaaactcatctttcgaagcagcctcttcgatcgcctcagcgactttcaatagcggttgattaacatcggtcatatccttgaggatactttggatgggacgcacgcgcgggtccattcccttgtaagtgcgatggccgtatccgaataacttttgctttccagattttatgtcttcaatgaaggctggaacattcttcggttctccaatgttacggagagcgagttgggctgactctgttgcgccgaagtgtaggggtccgtgtgcggcagccacggtagctattaggcaggacactgggtcggtgagagatgaggcagtaactactgttgagaagactgttagggccattccatgctcggcattcaggttgccaaagcggcggaaacaggacacgcgagtgggatctggtcggtttgtctttgggtctacaagaccggccatggcgaatagattctcgtagtaggtttggtggatcgatggagacttccagggaatgcctagtcggtgggatctcacggccccgaagaccacagcgtaagcagcgacagttcgtaggattatttggtcggcccgtttgatgtctctttggtaaatcgtcggatttgtggtcgctgggatcacatcgggcgtacaggccaggtaggctgaaaggcctgctagaaccagcggcagtgggctagtctccttgctgtgtatgtaagcgcttgttagaaacataagatggtggagatacgatcaaggaatcatcatacgggagattaacgatggtctggcgcacaatatcagggaccacttgcatatattgtgccagctgccggcgcaactcttcgaattgacttgctgtaggatatgttccccatagcagcaggtgaaacatttcttcaaagtcacacccccagagttggtctagggtataccctcgatacagaagtaggccgcgctcatgatcactaaccaccaatcagccagatatctcaagggcctttgtgtgattctcacgagaagctgataggtgattctgtcacggctgtgttttgcaatccgggatcataaacacgcaacccatgggcaacttggtctgcgcgattgctgttcagggaaggtgcccggatacgctgaaggtcggtcgcccgtactgcgtttcggttaatggggatctcataattcgcgttagtgcgtgagtcacggatgaatagaatgccagtcgacattttgaaccagaatactaagtaaaaatgaatttcggtgtcggagtttcgtggggaagtttcggtcaaatggttgttctgtttccttgtacgagtcaacgtcgctgattgctggccctgtcagagaagacatcacgtaaggcaacgtatgaagcttgccgacaaagatacacccggtacggagtactactggcattgaactctacatggtcgggctgtgtcagggatatgtttaactattctggaaactataaccttgcattcatcattatcactcgttataagcacccattagatgttttcttttctttagacagccacaacgtcccgcatttactccggcatgtgcttgaatgggtgggcaagggattcctggcagaaaggaagcttgctgaccgtccagatctcggtgtcctacattgagcgaggggtcagtcacactctggtgaaagttaaatctagccctaacttgtgacacttacgggcttcaagttcttcttgatctcagtatccaaagtgccggccttgatggcaatgatatcgggagcggcatcaggatcgtgagcgatcggggaaccacactcagagcagaagatgcggtggacagcgtggccggaggaacctttgccagcccagctcttggtgggacccttgatagtcagcttgtccttggggacaacagctacgagtgctatacaaagtcagcaattgtgtttctccgtgggtatttacgcaactaacaataggtcgagccactctggcgttggcagtcatcgcagtgatcataggcagtgaccaaaggagcgtcaatgtccacggtgtacgtgacggctttgcaaaggcagtgtccggagagaggcattgtgtatgaattgatggattgattcttccaaggtacttgtgattgaggacctccggagatgggtggaacggtatttaagggataattccccccaacattggaagaaagttgaactggtcatggtcattgatatgtcaagtcacgaatacctgctttttcctttgctaatgctggtgaaacaggtacccggtacctaccaagttacgtcatagctacgctgtgctttgattgagctttttccacaaaatccaccaagtttgaccgattcaaccagtttgggcaattcgaattccaaatagaaaggtcgttcgggatttcaaatcggctagttctcttttttggcccctgtcagcccaaaagctgcaaggcaatgacaaattattgtgccccgccagagctctatgcaaggctttgggaaatttacccctccacaaagactcaacttagcgtgccactcatatcaagtctcactcgataatgctgatcgagctccacaaatcaccttgacggtggagatacgacccgccttatccgacggtgccgactcggtctccttcgcattcggacgctctccgattcgtataactgaaagccacaatgtgtgttcaagctgtctcgagaacgaaaatcgcttaggcgccacaattgagcagttcaatcattcgcattaaagcgaagatatcaggtgataagtctgctagcaattagcacggcttacagtggagcatatgtgctagtgagtgagctgaagtggagaatattgtgagtctacaatttgttctgcgatctgcgttgtgatcaaccgctaccgacccagacgctagacagcagtaaggagctaggttcgtgatccggtgacctggtataaaccggtacatatttgtcagtttatgcaatccgggcaagaagctaaactcccgaggatctgtacagagttcgtttaatacctccgcggtgagctcgcttttgtactttcccaattctcatgaacatcagagaactgggtcaggcctcaaataacgtagacgatatcccagaaatgttcgttgtcgagtcagatgtcatgtagctttgggatctttcttgatttgtgtacatagtataagttaaagtaggtttaccaatgtgtttacattggtttgtacaatatatatgtacaactgttggttgtgcgcatcgctattttacatgacagtatcaaatgttatagctgccataactacctcgtcgggcattgtcgatcttgtccgctgcactctgcatgcgcctgtcagataccgtattcacaaagtttaaactacacttacctgcatctgagctgccattcctccccgaggattctgaccaccataaacactagcctcagcatgttgtgcgtcacgggcatcatctttggtgatatatgcaggcacatcagcgacggctgtgagccccaaggcatcattactgtcggcaatcgaccgaatctgggcagagatgtagccaactccaggtggttggttaaatgcacgtccctatgggaccttgcgttagtaattaatttgacactcaatactttcacgggaattccctgacctctgtggcttgaatctcctctgcatcttctatcgagatcgcgctggatggcttccgcgatatctccgcgaccttattttcgaaattcatctgtcgcatacaaagactctgggccgttgctataatcggtcagtcgtgcgttgcttgaagacgcaatagagtttatgcttaccagctggtccacctcgggaaggtccgcgtccagtcaacgcgctctcagcctgtgagatggccgaaacatcatcctgtgtgatgcgctgtcccctctcggcagcgagctggatttcggcgacggtaggaatatcaaaattcatggctgcgcgtatctaaatgacatttgtttttctatttcgcttgatctcacagcttgttgttgtactatatacttcgactttagagccggtgatgtcacggtgaggacatatcaatcgaccgaactttgcctttcctcgtcagtggtgggggcgttgagtatatgcagacttcgaatagaacattcgacgcttcgaccaaacagaaattgtggggggatgcgtgataccccaattttgccatgtcgccaggcccctagcacattattccaaatcatcatcacctcgtggcacgatgtctgcaggaccatgcacacttggtacaacgcagccatgattatctggagatctccaaggcagaacatattgcttaaatctcgttgactagttatgttttagtggttggccccttctcaacggggtagggcagcttctgagcgccgttcgcgccgttccatggacgtcctgctgcagattgcccctgtcagtgccaccgctaccaaacccaaaaaggaaagaaaggacgtcgaataagaatcctcaggacgagccaacttccatgccgcgtcaccatcgaccgctctggccgaacgacggcaaccgaatatccaaccacgagatctggagagtcccacgttgcgtgacatggcatgatagcccaatggacccttgtcatgagtagcacgcctccattaagcttcatgctctgggtggtgtcagacacatggctacgagtctaagtcacggcaatgtacctttggccgatgtctacgaaattgctcaaggcagtttaagatttccagttagcaaggggtttacccaggagctctgtaaaccatacgatagtcactgttgcaagaccatgtcccgcatgagacctcatgagtgagggtcgatggggcatcattccggcgtttattgggacggacccggagatcaatttgttggaattgacataaattctgtagtagtttttgggctcgtgtaagaagaattgtgcattgattttgacatggaatatgcaatctgatactcaatgtagaaattgccgcaattttctaaattagaactcttacaaaccatacttatgaccgaatatttaaaataaggagaggcatgtagctaatcccgtggtctcaaggaaactgcggtagtaatagatttgacgtcataggctcttgtctgatagtactcggctagactttaaaacccccaaattagggcagtcagttcatttgagaacagatcgagaaaattggaagacataccacgtgcatcaagtaaatctgacttagaacattgacactaacgtgggtaccgaagaaagtgtccgcgtaaattctttgcttgatgagtgacagccacaggtgtagcctggcaggaaccgttcagcaggccagctggtctaaccctctattttatttttgctttagatcgcgtattgatacattgcgatgacgtatattttcttactccccagttaaaccatcactttgagctacgtacataaagcgacgaacagtttatagccgagaacgctatcttatttcgggctacggtacctttcgtatctccagtcatgctttccagtcaggctatctcaatcttcaggcagacattggcaacttgacattcaagcttgagatcatcaaatacatcacctaactcctctccatccgcgaggcaaatgcctagctttaattttctaagattcactgaaaagttcacggcgcgcaagagtttcaaaagctgcgatgatagctcgaggtggtaatcaaacataatgtctgtgatttccagattcacgaggcaatggggcaagatttccgtaagtggcttcatatcccagttaagtatggagttatcgggagatttcatcagatgatcatgtctgactttaagtgtttcgaggacattaaagtctttaaaagatccgaaagggttttcaacaacatccttttcagcaaccacttgatctttatatgcatctccatagccgatgcgtagggtcttgagagttgttgtaaatggaagaagagccaagcggaatttcgaggcatcgaactgcttctcctcatcgaggtcatattcgtctgcctgtatctcgactctgatggaaatgtgctcaagatgtgtacacactgcgagccagtccagcataccgcgacaccagtaaccctcttccacagtaatatcctggacagggcacacgtcttggtaacttttgaggtccatatcttcatcttttttctcgcctattgcggttccgtagatcttgcggacttgagggaaataaaagaaaggctccacaaagcccgaatcaatccacgaagccccccaggcaacacaggctcggacctcttttaagtgaggaaacggcggctcgtggtgaaatggctgctggcgtttcgccgccttgagcaggatttcggatacgaggtcggaatgttcatgctggaactcaagaattcggaggttggttagccggacaagaaataggcccaaccatgcttctccgcatattccctcctccccatgaagatgctctgtccacaattccttttgctcttgctcttccgtggtgaagatgtcttccagcgcatgcttgatgaagctttgcatctcgtcgttcatttctaatggatcatgctggtcacattgtgaccagcataggtcgagtcgatggacttgtctggcgagctccggttgtctccacatacgcatgattaagccgatgaatgactctgtaaaattgtccgaagatatgtatgaatacatcaaaggcgagaatagatcatgaaatcgtcgacaggtaaggcttagcgaatgcaaggtagactgagcgcaaccatcttcctgggcgtgcttcccaatagctagaagaagttcattcggaagtcgatccattttgaggaaatgtgcactctggtgattgacggccttatgaaaatcgtgtattaaaaaatgatgaccaaagtgacggagggccctttcatttaaatcagatgttacactaggcccttccaaatcgtgcgtacgttttctgtctcaggtgagacagtggatcgacgcttggcgtttaagactattgtcttcgcgtttttggatttcgataccgcgtcgaggctagatgtgcaagaggaaggaaacattggatgttcgcagtcgatcgaaacttttttcactttcgctgcctagacgataggtccgctaaccattacccactaatcagcgaagatctagcagggaagacgaactcaggattggacaccatgggagactaaacagggttttggactagcaaaaactaaaatatttaatatcagaaaattgcataccttattcttgtgtcccttgtctcgccgaacatgcaccaacgtatgccaagagatccaaacggtatgttcggtgaaccaggattttcttcataagctgcatctcaaaaactaatggtctaagtgttcagttggtcttttatctctacaagaagctatttgatcatctaagaaggccgatacggcagctgcgacatgaagagtttatagagttagtttatattttcctagctaggcaggtacaggtacaagctaaccggtgtttgagatataacagggaaaaaattacggaatttctgccgagtgcgttagacactgttcaaaggaggtttgcgttgagtgtataatattttggtacggtatgtgtggtgttaaaataggatatatatgtctgtagagtacaccctaggaaagagattgtttaagtctgttcatctatgcagctcacctagtatttatagacatgttttgtatactcactcagaagtgagatgagttgtggtccccttctatgaatggttccacggataaacacgcttcataacttcaggcctgataaatcaggcaatatgatcctatcggagtaactacgtaagcagaaatcaggtcatgtgggcccgcctaagacctcacgttgatacccctagtttaggcttatagaaatgctggaaatgtacggtatctttgtgattagatcatcccgttttagtatgaaatatatggtatatttacaagggatttctacgggatacatccattcttatatactagttaggatcgttcagtcgatttcagggcacagtaccattggtatttagtctaaatatgaacgactgttagttatttctatcttttcaggtaagcatcacatgacccatgcccctcaaccctccgcgtcagaccaatcacaaacctgccagaaccccgttaccgggattgagcgctaccactctgttttcccctatcctatgatgaaaaaaaaatcaaatgaagaggataaacagggtgtttgatcacagctttcgcttgatttgtgacctacaagcccgataagagaccgtgttcgcccaggactcaaaaatggaggtgtatgagcatctattcgaaggttgttctgaaaaatcatgctaaggtaaccatacacagattacccaaaaaaggaaagaaggcgtgtactatgtgccgccagcaaaaggtacggctgacttccccttttattcttttataatgtattaactccagtaggccaagtgtgatgtctggcgggatgagactaaagcgtgttcccgatgccgagaccgcaacctcgaatgcaccatagatgacagcttcacaagagagcacaagcgtcggtaagagcccgaacccgagtaagacggagggaatccacttcttatagttctccaagccgatacatggcattagaacacgagaataagcggtggcgccaacaactacagagctcacagcagttgaactccgattccgtgccgattgcgttgcccacagcgacaacggaattaggcgtcccggccgtgctgaagtcagatggtcaagtggacgattcgcagggtttgccgctaccctatccccaatatcctcttgcaccagcgagctccacatcgggtgtgatgatgggaggggatgatccgacgaagccccgttcactgaaaagccttaccgttacaggcgcagagattgatgacctttatcaattgtagatgtcccccaaaccttgcggtccacaaggtgctaatatcttgcagattcttccatcattatgcctctttcctcccgatcctcgatgcgcagaccaagccgaatgcgtactacgcgcagtctccattcctgttctgggccgtcatcggcgtagcgagtcgatcatattcccgaaacccgactttgcagactgcgctggcccaggaagtcacggaaatggcatttctgtcggtcatgtcgacgtgcgcgccgtggcacatcatacagggactattgctcctgctgacatggccgtttcccaaggagaatcgcccagatgtgacatttcctctcagcggcatgcttttgcatgtagcgatgcaaaatgggttccatatcccgatgtcgagccatgaattttcccgggcgaagattccggccccatcggagttggatatggtccggcgctcagagctctgggctcattgtgtgctggtgtaccaacggtgggtttctttcttgcaaattgcgagcaaccgaaatcatcgtgctgattcgtggcagatcttgtgtgatcaaagggcagtctccgcaaaatctgttcagtttggcacaggataccatccaacgccaggtactatttgataagattgccccggatctggttcagaaactcaagtgccaggatgtcgttgggagatgcagcgaggcagttatggagaatggagttcgtgccatgtctctggaccaggagctggctttagacattctgctgcggaagtatgagggagaggtagacgatattgcactgcaagccgtcggtttgtttctcacatatacccctggcaatagtccatccactaacgcttgtttatttattgcagatgacgagaggtatcacattctcctttgtcgtatgtcaatccacattttccatttctacaaaaatcaaaccctcgtctctagtggatgtcttccacgtcttatcgccaccgcttgcaacttgatagactatgtccaagcctttgcggatcgtatgggagctctcttcatggcgcctattcaaataagcttcggtctgctcctggcctcgatatcactgttgcgaattctcaaaagtgaatatgcctctagcggactcgatacgagccgtgcccaggcgtctttcttcgccgccatcaatttggctaagcaaatatccaccgacagaagcgatatagctgctaaaacgatcactctcctgactcaactctggaatagcagcaaggcattccgcaaatccgatggctcggaatataccgtacttcgaattcgaagtcgcttgatcctcagtcagatcttggatgcagtatggtggtggcgtgatgaatatgaccctaatgcgcgcatgaagatgcaagcgttggagtctgttgacggtccttcccgaaccaacatgcttccaggcattgaggcagggcgtgctatgacgggaacagatcccgctcgggagcccgctgggggaattactcagaacttgggtcatttgcaaggagagttcgagatcaacgaggattactttaccaactttgagtggctgagtgatgaaattttctcatttcctccggattcattgttagcaaccaacttaccgtgagagcataagttgacttcgaatctattaaggacccatgttacctttacattttcctccaatcgcggatcacgcctttcctgccgcacatatggagctgatatcaggcctcggtatctattacaaccccataattgccgatctcgggccattacccttgtatgtgcaagtgtcttcggcttaacacccccagataccgcagaccccacctcgggatgtcaaaacaaagatctcaccaagtctacgccactagaacaagcaaccatggaagcaatgcttggtagatcacgatgtacgcgtggcctcccagcccggggctatgaattctgcaggtgccttttaagcactccacttgattgatagagattaattgcctgcgatcggccttaagctcgattcgggggatttccggtgaattagatatggaatatccacaaaagagtgcatggataattttaccttgacattgcacttatgttaaatggcaagcaaccttggaataaccactgcgtactaggtggctatgtacagagcaggcaactacccctgaacatgcctcgttaagtgagattgaattgccggtttatattaaaggcggtcggcaatacattgtaaccccgcttaagcctcggctccttatctccaagccttcccccagcttttgcttctctctctctttgtcataggaattatttccattggtcaatatgttcggctttgtgcaactaccccggtcaagtcgaggcgaaacccatgttagtttacggagcacgggcacggagtacggatactccgcacagagccctcgatcgttccgttcatgttttctttcccataacataatatcaattcaatcgttagatggcagtgattattcctatcacgcgatgtacccccatcacttggcatatttcttggcatatatctcgggccaatgaggagtatcgattgtaagcgccctcctcaaacacccctgcaagtccgcggggcctccggtttgagacatgatagattcgaagccacctcattcgggtggtatccagtcaatcatcccagccatagaagcccactagaaaagtctccccacacattgttccacagtgcttgtcttgccctacctgagttggcaattcttgtcacccgctaatcatattagggagtccgagggagtccgggaacagccctaagatgggatcggacaatctcacaactccattattagctccggggccatggcctaaattcgactaatgcccaagataagaggctattgccggttatttgtattgcaggggctacaaccatctttgtatctattgggaatatggcctttcaccaaaaccgattagccccggagatgggccaacctggctgaaatcagacacatcggttggttggccactcattttagctgctaatttagcgtccacgctaagttcataacggcaggttgaccttctaaggttttttcctccgtgcgctggcttatcactaacaagctctcaggggattgcttctatgtcttggaagtaggatgtacatggtatagacagcctacgctgtctagaattacttggaaaagtgactatgctgtatgcttcaccccctactaatacacctcaggtattttatgtttcctatattcctctgtgaaatcccctcgaacgcgaactgggctggagtgaatagtcccatgtagtcgaaggtaacccaaggaacgccaccaagtatctagatgctcagatacgatggatgttctccggattatgcataaagagtaaacatgagaggtctgtgggctaccgggccaaaacaaggccaaatcacaacgtgggatgatattggtcgttgtcttgttatatgcacattgccactttccgcctcaaagcacctgcctccagccactcaagtctcgtggctctcgtctaaccatctctcacttctctacacccctgtctctcttccccccacttctttcttctcgtcgaatcaattccctaggtcgtcgctcggtctcatctcggttcgtgggttacatccactccaggataagcctgagatatcctctttgggcgataagacggacttccgacggtctcagtcttcgatcagctttaaatcatattcgaaattccctgttgttgctttcctttttctcattcctctcgtctccctgtgaagttgacatcggtactccatacgcttcaccatggagaaggacgagtctatcgccgtcaccaccggcgcgatggtcgacgagactgcgcctgatgataaactcaagaagctgcgtgatctcaaggaccaccatcactgggatcctaacatgcccgaggatgtcgttgaggaactcgatgaggcattacatacatccgacaagcatacccaagaggtcatcgctcaggaactcctcgagaactccccgtaccccgaggttcggtccgctgtctccaacgtcgatgagggtggatcagtcaacactattcgcgcctgggtcattggtcttctatttgcgaccatcggctcggccctcaacatgctgttctccatgcgccagccttacattgtcattccctcatacattgcgcaggttgtcgcctaccccgtgggaaaggcatgggaatggtggatgcccaattacaccgtccgtatctttggctatcaaaccgaactcaaccccggtactttcaccaagaaagaacatacaattgtggtgatcatggcaaacgccactttcggtggtggcgccgcctacgcgacggatgtcctcttggctcagcgtgccttttatggacaacgtttcggctggggcttcgagatccttatgtgtatctcgactcagatgttgggcttcggcatggccggcttcttcacccgcttcctggtgcagcccgccgccatgatctggccctcgaccctgattaacacctccctcttcactgcactacacgatgtcgccctgccggatcccagcaaggtcgctggctggaggatcggcaaatataagctgttcctgtacactatgattggctctttctgttggtactggttcccaggatacctcgcaccattcctgagtatctttgcctgggtcacctggatcaagccccagaacgtggtcatcaaccagctcttcggtggagcgaccggcctctcgcttatcccaatgacatttgactggactcaggtctctggattcaacttcagtcccctgattgctccttggtatgccatctccaataccatgatcggcatgtttctctggttctggatcgtcaccccggccattcactactccaatctcttctacgctcagtacctgcccatgagtgactccagaagttacgacaacactgcgaatgtgtacaatgtcaccaagattcttactccagaattcacatttgacagtgtgaaatactcgaactattcccctctcttcctgtcgacgacattcatgctgtcctacgggctatcctttgccagtattatcgctgtgctggttcagactggtctcttcaacggtgcggatatttgggctcgattccgtcgcgtcggaaaggaggaggaagatgtccacggtcgtctcatgaatcgctacgctacagttcccatctggtggtacttgggtgtgtttgtggccatgactgcaattggctttggtgttgtactgggctatcctacacacatgagctggtgggccttcatcatttctctgctcatttccgccgtttggtttgttcctattggcatcgtcaaggctgccactaacatcgacatcggcctcaatgtcatcaccgagttcatcatcggttacatgcagcctggtaaacctatggccatgatgctgttcaaaacttacggttatatcagcatgtaccagggaatgtacttttcacaggatttgaaaatcggtaagtcccgtcgctggctatctagatacattataccaacagtcctcttccattaggtcactacatgaagattcctccccgcgtgacttttatggcccagatggtcgcttgtctgtggtcatcgctggtgcaaatcgccaccatgaactgggcactgggcgcaattgagaacgtttgcgaccaggcacagcgtaaccacttcacctgccctaacggtcgtgtgttcttcaatgcctccgttatctggggtgtcatcggaccggcccgcatgttctcgatcggcgagctatactcgcccttgatgttcttcttcctcgccggcgccatcctccccgtcataatctacgtcggcgcccgttacttccctaagagccctatcaagtatctcagtgcgcctatcatcttcggcggtgctggtctaattccccccgctacccctctgaactatctcacctggggtatcgtcggatacgtcttcaataagtatatccgtgaccgctggcgcgggtggtggatgcactacaactacgtcctgtccgctggcctggatgtcggcctcgctctgtgcaccattctcatcttcttgaccctcaacttgaccgataccaacttccctgactggtggggaaccaatattgccgccgacaccatggatgtcactgatacagccattcgggtcccgctcgctgaaggagagacctttggtcccaccaagtggtagacaatcggacctattccatgttactttggttcccttgggagccaattatggttgcaattcttcggatatccgtttagttcagatcagacacgaatattcacgatatcacagtaataacattgatttatgttttcctcaaactttctgtatctaatatttcgagttcattacgtggctcgacaggagcctaataatacagcgaaggaacttatttctatctcttcactttccttacttcctttatcgcaagcagtaatttcaaaatccaaagatagcttcaaatgcaagatatataaaaatatgacacatgtgtacacgcttatcggactgacgaccaccaagactcaaatgcaaatcgaaaccgatgaaccaagaaaggcgaccttggtcatcagcacataccctcagccattcttgatggtaatccaaatatcatccagacttcattccattccaccctaaatccaaactattttaatcctcaacatgcatattttatttcaactcaaacccgacgacgacgcataccaacctgcaaaccaagcggcttgcgcaggaatccctcacgcgtctgcatagggccatcctggtgcatctcaaactcgaagagccggaacacagtagcacagataacgagaagttccatctcggcgacgttgcggccgacacaggcgcgaggtccgtggctgaatgggataaaggcggccttttggcgtgcggtgagacgctccggattccagcgctcggggacgaattcttcggcgtcggcgccccagatttccttggagcggtggatcgtgtagctgggtactgagagcacgtcaccggcttggaaggtgtgtccgcagattacgatgggcccgaagccggcggggatctcgcgaggaagtcccattgaggatgtgctgtggatgcgcatcgtttcccagatcacccattggaggctgggcgtttgtcagtttgggttaattgtgtgcgttgatggggtgtgggcttactaggggatttccttgaccatagcgtgcgtgggaacttcaatgtccttagggagggcgtcgtccagggtcttgcgcagcttggggataacgtgtggggtgatcatacaccagtagaggatggcacaggtggtgttggaggtggtgtcggagccagcaatcagttgagtcagggcctcggcggtcagttcggcgcgttcaagctggttaccgttttcgtccttgccctccataaggcgggcgagcaaatccacacgggtgttgttggccataacctcgggcttcagacgctcgttgacacgggcgatggcgataccagcaaggtgctggacagcttgcagaccttcgtagaagaagcggtccgggatgtacttggcgaaggggatgagggacggcatgcagccaagggtggcagatacctcgccacgacggttcagaacttcgacagcggcgacatacttgggagggtccttagggtccagacgcatctcagcaatatcctgtcccttctcgagcatgccgaagggagcaccgaaagccaagtcgccgatgatatcgaaggccaggtagttgaaccagttgagggcatccaagctaacatatccggtcttggggtctccctggaggtcggacagacggttccattgcttcacaaactcctcgacattgccatggatatattgctcgaattggccaatggacttggcactgaaagtgtgggaaacggtcttgcgtttgcgggagtgctcagcacggtcacgggtgttgaacaagccacggcggatagagacgaaggcatcgtagaagtccctaggatatcgtcagtttgggtgcagttttcctgggctgcaatattgacgtacgctttcaagaagccattgccgtgtccatagacgctcaggatagcttcgtcgtcggcaatggagacttgggtaggtgagatgcgaacaagctttccatacttcttatgagcctcatcaatcgtcaagtacttctttccctgacgggcctgcagcagcagccaaacgttggtgaacgcggcaaacccggcagagggaatgtcgcgcaggtgcgacttctgcaagtacggcaccaagtaataggctacggcgaggccgagaagaataaaaggaacactctgaagtgtcacaaacatagtgaagtgctgtataggagtgttggacaaaacaacacggagaaaaaaggtaccggcccaatgcagacaggataatgccgatctgaatgcagaatgtaaggtcaaacaagaagaatcaagccaaatccatcaccaagcacgcgtatataacctatttatgaaaagaggacgtgagatcatcgaatcatccccgagggtaaggaaagcaacgggaagcaatttcggtagtgtggagttcagacactggcggcgaagatccgtggagagtgccgtctcaagcctccgaagctcccgatttcggttattgacatgggggttccagacaaatcaacggccgcatattgacgatgtggtgactccattctctgtatggcgtaaatccttggtgcttgatttgttgaaatagagtgcgggggggatgacacgaggcgccacggacgccagatttataaggcaatagtatgtgtcatccgttctagtcagccttggaggtcgggcatcagcttacgtcagatcgggcacaaatccgaatcggggtatcggtatcacttgcagaactcggtgagaatgtgccttggcatgttgtatgtacatattaacgttgaaaatgtagatgcatggatatacatgaattaaaatggctcctcacttcccatcttcattaatgatgacgggcatgatcgtggcgatgactcatgctcatcaatccgtgcgcccccaagaagtcattgatctgtttataagccccggtggcattatggtgcagattaatagcatggccagtgtttggatggacataggcagagaaagcactggccgaggggaagatcatcttggcagcagcaggaatagaagccggtttcccacccgtgtgcaaacagtcgcctccacagaatggcacatcgttcgcaccgtcaatgacataaacagggcctgtaaaattgctctgggccggtagaccagtgatagtcaggagttcaccgatggtcatgggctgcttgttctcttctgcaaacttcagaagaccggtgtcgaaatggggcgggtagaagaagagatatacattgctgccgatgtccgcactcttcaagtacccagctgtgtagtccgagttcttgccgttgagacgggcttgctggaagttggcgccgctgagaaacataggcatatagtctgcgcttgtcgaatacccagtgagcacgagcgcatcggaaagctctgggtacatcgcggacagagcaaccgtctgagcagagccgaatgaatgcccgacatggacgatcttggtgggagtcttgatattagatatcgcaccgttgcgcaccatgcgggtcaactgggcaagggcctcgacctccaagaatgcctggatctcgttctttgcgtcgccatgtgaggagttgccaaggcccagtcggtcataggagagtgtatgatatcctcgagacaagacgtaatctacataggaatatgtatagttgttgtatggtagatcccaatatctatatttccatattagaccccatatagagaaatcaatttatctctcgaactcacgatttgtcaaagcccatcccatgtgtgaggatctgaagcgtgtaggccgagttcccggtattcttcggcatgcagtattgggtcgagatattgtagtggcccgacacggtagcatagcccgacaaggctgtttctgatagatttctaccctgtttggtcgctgagaggacgaaggaagtcgcgtcaaagtttgtctggggcgtgctgatgttatcgaacacgccgttgcgagcagtgacagggacctccactgttacattgtaacaggtcttcgcagcggctgcaccagccgtcaaagtccaaagtccgattgttgaagtacgcatcgtgaatgaattttaggtgtatctctgcactcgttcaatgaacgcaaaggggagtgtctccattatatagaatttccctcagaaagctacacttgcgacaaaagaacatatcaaaaatgcggcaagtccatttcgaaaaagtcggccccaagtgatttgtcaaaaggctgtgattctaaagttagagtggaaccgtactaatgcatagatcgatagcgcaggcccatcaaaggttgttctccggtgctgagcactgaaagcgtcttggacgttgaggtatcaagtccttaacaattgacataatccagcattagaggcatcaatcatcgtctacatttgatctgatacctcagtctgaagggggtgaagatgtataagtttgccgtgctcgctgcatactgtcgatccgaatctaaattggaacgaatgatcattcacgatctctcagtcattctgatccacttggcccgagccctaaaaatgagaactcaatgatcacgggtttctaccgaggttgatcataacaggctcttggttggtattggaggataataactcagatggaagcaagaaaccgagtgattttcaaaattgggactgtgaatatagagtatatatgctgtcgagatagtctaatagtagtccactttcaggggaattagggttctttgaaaaacggtcccctgaacagtgcattagcgagaatatagatccaactgctgcgatatatacccaaatccgaggaaacgatctacaagacctaggctttcgtttggtggagtagtcgatagagtctgaaaccactaaagatgcaagaaagaggaccagagcgagagcgagaagaatgtagccgtgcacacccgaaattagatacaaatctacgctgtcgccatgtaaattccaatgcgataaatcgtcgtataaccaagttatccataagtcatatgtgcgagccgttaatcaccagcgatcgccagttacagggaacaacccgttcttcttcttttcggcatcccaccgctctatccacaccttcatctgatcccggctcttctggctgccaacatttaccgtcgggatgacccgcccgatacgcaaagcgcagcagaacatggtcaactcgcggaacgaactgtgttcactgtagggcacgccaaagcaggcactttctcgcgtgctgccgcgctgcggggtgaggtcttggctggtgaatggtgacttccagtgttcgccgtgtagtacagtggagactggtggattttgcactagtcgcccggctggtgggcggtaggtccaaccggtcggacggaaaccgacaacacgggagaagtgtggtttgaagccgtcaaggtagtctgccagtgtgtcggcgcgaatctcaaagagggtttgcatatgtacttgtgcttcgtgaggattgctggtcagcatcgcggacagctcggggtcttccaagcaggcgcatattcgttgctttggtggagtcgcgaatatcttggatccaagtgctcgggcgattcccatgcatatccgttctttgccaatgctgtaagtgccaatcactacgagtagtcgacctccaacctgcgagcctttgtccggtgctttgttgttccccgtggcagcggagaggaatttgctcatcaaaccatctgtgctactcttccctgtatcatgtccgacaccagcctcctgattcaggcgtacacatagctctgaacacgctgtgatcacatcttcctgcgcaggaaagccatattttgggtttaggtatgtagtgtcgaggtaacatttgtcgatgtgttgttgtctcgacttaccagtgaccgggttggtcacattagggcgcaggagcggatgttgcacctgagcaggagatgcacggaagtcaccacaatgcagcacccgctgattatgcgcattgggcccattcccagaggtttgttcgaaaagaaaaagtgagctacccgggcaatgatttgcatgtatcatggtgacccgtactccgcctgtctccggtacttcagtagtagattcgaactcgaggtcaactatccacttgggatcaacgcggagctgctgtcggacaagattggcagtgggtcgactgcagtaaatgggcccatggcaccaagacttgttgagtcctatgtagtgatcgctgtgaaaatgactgaggaagtaggcgttacatccttcgacggctccgtagcggaaggcatcaacgcatatggaaaaccccgaaagaattttgtaaaatggacaagtccgttgataggcttgtttgccgcgagaagacacttcgtttgcggctgcagcagcccaagcagtatcttctgcatttccagccatcattttcgagaatgcggaaccaccaatggctttcttctgcgagtagggatcactttgcgcaggccgggcaatggcagcgcgttctgcgcgtgtcatccctttgtcgatgtcgcctgggttggaagtaggcttcgccctaggcttaggggccggtggagccgggatagggtttgcttggccatcaaggcagccgttgacatgcactccaatttcctttgctgggaattagcatttcagtaggcccaaaacgcagtaatgagcacctacccattcttcaagatcctttagcaccatttgacagatagggcatgtgctcacttccccctcaatatcttctacaccagaacagtcctttagatctttgtcaggatctacctcaaggtcgatctgctcttgttcctcgccctcccaaggccaatttcgaaattcttcgcctataagcccgtcttcttcttctatatcgtcaaaattcgcgaattcatcattatcggcattactcgtggcggctcttaccagtggcgggggtataggttcggaagtgcgttgtgtagccactattttatccggttgcaatacttcgttcgtcacagtcgtcgtgacagttgtagtttcttggagctcccgataggcttccatatcctcctcgctgtcggactcatcgataaatggtccgctcctcttctggggctttgtagttgctgatgcaggtgcggttgcttttgtagtcttcgattcgtctgattgctgtgtctcgttcactggagtatccggtgagtcgactttccgacgcttgactgccgtgtcgctctcattatatcgcttgtcatccgctttcaagaactctttatcttcaccccaaaagtcaggcgtggtcgatcgctctctttcactcgtcaccgctgcttgttcaatctttgccagtccctttttatcctctaaaaaaagcccaccagaaggatcatttcttgcactattcccccggattgttgaagcaccccggccgctgctcggtgagcgtgaagttgctgttacaaattgggtgatccgagcctggcgagaagtggcacccggcggcgtgtcggtcttctggaagaaactcaagatgctcgaattgcgctttacggaggattgtcttgtgccagaagatcccttggaaggcgtggcccctttcttcgcgtaagatccggccattgtggttcagcggagaggtgggagtccgttgcaccgtgtgcgagaatcgagttgtggcgagggtctaagaaagttcgcacttggcccaaagtagtttgatatcggatgaaacacaaaaagtatggtcaaatgtacaatatgtccataatatatgcaccgtcgccagagaaatgtatgtcaggtcaatcggatcgagaggcgcgaagaaactggatcgcgacacgaagtcacgtgctcattattacttgactcctagcggggactacattcgattttggtatgtttagagcattgtgatatagtcaaatggccaaaacaaattgctgttcattattgcaaaaaaaaaaaaaaaaaaagtctagcaaggtatcatgaacaacatagcctagatgccagcatgagctataggcgggtaatctccgacgacattgcttttgcggcgtatcaacaagattcatgagcggtagtccatggtccgtttggtatcttggacgcactcgagggtatgggagtttcgaatcattcgttgcatcaactcgtctccccggtcatcaatcggggccacatgaaaccccatacatttggccatatagtcattttcattgctggagaccaccaagtgggaacaacggtattgaagagcgcgatgcgtgatttgtcgtaaaattgaggctagagtcgtttagcgagccttgccagcctggttggcagcctctatatgatgacggtattagtattgatttctagtttccgcaactttcgtatatcctttaagaaaggaaataacatagactgagctcaagaactcagtcggggaagatgcgcaactcacctcgccgtgtggcatcctccaacaaccccacgtcaacctccgaccgaggcaacatcacgtaccgcaccacactgccgcggatgaacatgttcttcaccgaagacaggtgaggatacttggccagctccaacacttcgatatcatcgagcttgatgtttaggtattggtcgaccgatttcaggattccacgaatgcggatgtcatttttgagctcaattgtgaccgtctggttggtcagagtcttgaagaagctgtaatagcgagcccattagttcctgtccacacaaactgagtttgcgctccgcgtcatagcatacctgaagaaaagcatggttgcggtggataggaaagcttggaggggtgcttggatgaggataggcgcgctggatcaaagcggtgatttgtattctgccgatgtcggaaggtgctgtgagttggatgtaagagcttggataatgagtatcacgagatttagggacaggaatgtcgacggcgctcgagagttggcaaggtgagatgcaaaagagaagcaggctgacgggatcacgtgcacatccccatataagcggttccaactcaaccaacgctcggccatattccctcgagtttggatttctatcgactagaaactattggaggcttgttctaggtcattcagcacatatattcatgaaatatatctctgacttctaacaatgcttatgcacgtctacatccgcttacacgggtgaatcatgctttagccattccccattgaataagcgccgagtcctttgaactaaactccctggttatgtcttggataaagtaggctagctgagcctataaacacatgaacaggagtataaccccaccgatcgaatgcctatcgcttgatatcatcaatccgaaggaaaaacccccacatgatgaacggggacctcttatatgggtcaaagcgaccggtatcttttcttccgcctggcaggtcgttttatcgctgtaccagctcaagtctcgatgtttatgcatactggaggatccagaagccattccttctgttccattaggagttattcaggctttgcgatgaggctagttacgtcgagcatattgggattaacatcatgctctatgatggcatttggcatcaatttgcagctggataccaagaacttccgggtggatcagaaagaacgaatgccatctatgagacctgggaaaagggcatggcgacgcccaacatcaaaatctcgagcatcggcgttagattcttacgcactaccaatactcttatccctgatgcagatgtgcgcgtgattgatatcaatggggaaatcggcctcagtccgtaagggtattgtcttggttagtgatgtgttggaatactagggattctcgattcttggttggctgtagccacaaagtgtttaccactaatttcattagatgtacagcatgatttttccggtcccttcggttgtcttttggtcatttgtttcactcaaagttgcttctaggctgacgcaaccttctctacaacatccgcgggtaagcaaccccgaaagccgaggatcaacttggcttaggagggcgggttattcttcagcactgcagcactgtgcagattgtgccgttggtctgaaacatagttgttggaactactttgtacaatgtaaagtcactaataatcttggaggacgaaaccatcatcatgcattggctgcatgcgcataattctggcaaagtgtcagatatattgcaacgacataagacatgcggaactctaggcttgttctttcagtcgagattatcatttaataattgccattttacatggtgagttcccatggcgtgctgacttctgaacttctacaatatctagcgccaacttgtgaaagcatcccggtaagaggggaaagtgtacgacatcgattcatatcaacatgagaatgtatgtattgaactggacatctggactctacgcgcctttagggtcacatcgtccacattttaatgaggggcaaatgtgacaatgaggtcaattaacatataatttctatcttaagagaactatacttctctagcgtgcattagtatagtgaactagatgttaaattgttggacttggcgatcttttcccctcttttcgctctttttcctcctttttctcttctttttgcgatgatcactacctcatctcaccaaatctcccatcatatgacattaattaggacgatttcctgcctttttcggtgctggaaaggtgcataattgacgttccatccacctccgacgggattaattcgactaaagatagtagcccggcgcctacagtcagccaatcaccagcctcttcacactgcatatcactctcatccacctctcggcaggttcgtcacaccatctacgaacctcattcgtccattttcgcattttgaatctcatttactggactctggctcagaaaatggccttggctctttgctgacgggcgaaacccctgtccagcgcgacgcgcccatttcctctccaccaataagatcaatgtctgctaccctccagaccagggtgattggattaattgtgcccaaccttgcattagtctctgtaacggagtgactctttctgaagagtgatcggctgctcactgcacataccccgtggctggtggaaagcgcccaattgactataaacccgtcccaactgccacaatttctgtgaacgctagcgttcttcgtttcgtggacttcattctcttatgctcggtgcctatagctctggtagcttttgcatctgttttatttcttattgttatcttgctttttatctttcacttcacagacccgttgatcggtgtcgccatttcctacgagtcaagatacccatagatatttccgtgagcgagtcacgcaaaaccaacatccaacagtttgatcaggtgttcaacatgaccgatatactccgtatctcgactgtacgattcccgccccctcggcaggcccgaggaacggtgcttaatactataatggaggatacgcgcgaatccaatttcgctcaaaccagtcccaaaggctcgcccccgtccagacttacaccggcagctatcagcccgcagttgaagttgcagaccagcgggttttcggtaccaacacacgcccgccttgcccgcctaatgtcgcctctctccgccggcactacctcatcatgctcagatacagaatggcaggctcagatgcaagagttccgaggatacgacgacttttacgatgccacagatgatgatagtattgacgataatgaaaccgaaatgagcgattcatgcttttcccccgatacgcggccatcgagcttgattaccccaatcacccgcaattcggtgacctcaactgggagcagtcggaagcgctctctgacccttgagattccctcttctgcattgtggccgtcaattaccgggtccctcaagggctcgccagtcccgcccacccctccatccaagataccagtctcgccagcggcgctgtcgatgctcagtcgttctgtacctgcatcatatgccccgccttcgctcgatggtagcatgacctcggaccaagaatcaataatcagtgcattggctacaccggactctcaatctctgccagacaccaactgggatgcacatgatatccatgttcgccgagatctggacggaagcgaaagcgatctagacaatgcggactccagttcagacatccatactgtacccattgctatcgagacccagcatgaggactggcgtcatgttctgggaagtttcccccgaattcccactgctgcccaggcatattcacccccgctctcgccatcgtcctcgccttcttttcatctgaataatgagccaatttacgaatatgatgacttgtacgacgccccacagtctattgaccaaggcgcatttctgcctaactcggcactggcaatgctacaccacgttcacttagaagagacacccgattcgtgttctgagacctcggaggataaaggcgagatgtggcaacttcagccgcctcccagccgcccgagaagtgccgacggggtcactcccgcatctgagctgtctggttacagtttcagcgatttgagcattccatctcctggtggattctttgcttctttggcgccccgagcgcgccacacgtggtcaatccccaacaccaattaccaaccatcgtcggcggctgcagagggtttctacaaccttccttggcgtcgggatgatggagatattgttgagcaggtagttgaatggcatgagccccctgttgacgaaaacccagtcacagctgttcgtgatgaagaggccccgcttactgccattcgacttccctgtgacacacccactcgtcggtctatctaccaagatagccccatgagtgctgcatttgatgcagtccaggttcaggagatcccccgctctgggaacggatatgaatacgacgagtgttatgaccaagagctgcaggaacgtgcagttgcgagccacgaccggaccaatatctggttgtcagcccaagcatcttacctctccgctcttagtgagacaaatcccgcgaatgacgttgagcctgtagaatcacccaaggagtctgatagtattgaggttgaagccaaagacaccacagaagagtctaccactaagatggtgcgattcgtcgagggtgtccctgagtccctcagtcctctgcccccgatccttgctagcaaggattcaatttactggcgaggcttccagtctattcgggaacagtcaaccaagacagatgggttcatgcatcgcaacatgcgcttcgatgccgtccaatccatgcgcctcgccatgaacgaccttcacatcaactgcttgctgggcaagtatgaacttgttcgccccgagcgccctgcatacaagggtccattcgccaaggcacctcgcaactcgactattacctctgagctggctgagaaggccaaatttgacaaggtggagaaggagcagctggttcttgctcagctttcgcagcccatgtgggccatggatgctcttcggtctctcaacggcggcaatctgctcacaagtcctgcccagcgtatgcttgcacaaacctcatcaaagcccaaggcctcgcagggaccacgcaaacgcagcttccgcatcctagacctcggcggtcagtcctcctgtgactgggcctggcaagccgcgtacgaattcccaaatgtcaaagtttacaccgtcgcctccaagaaccagaccgtaaacagcgccatcaaaggccctcccaatcaccgccaggtgaacgtggataacctctgggagcttccctttggcaacaaccagtttgatgtcatctccgcccgatctttgcacgcactgctaaagaccgaatgtcccgcaggcaaggaccgcgacgagtacgacctagttctgaaggaatgcatgcgatgcctcaagccaggcggctacctcgaattccaagttcttgacgccgagatctcgcgagcggggccgtacgccagtgcaacatcagtggagtttgccttcaacctgcgcaaccgtgggtacgatccagtagcatcgaagagcttcgtcgcccgtctccgcaacagcgggttcgtcgacacgcagcgcgcgtggatggtcctcccgatgggtaccgaacacgtcgagcaggagccgatgcgcgagactccggcaccgcgtgtgcagagccaaattgaagattacgaggcagtgcagggcccgattggtagcacggcggatattgccagtattactggactgattggagggtggatgtgggagcagtggttactgaaattgcgagtggagatgggtcgcgagcgacctatgttgcttgagggtcttggtgcgctgtttgatgaggggaggaagagtggcgcgggctggacctgcctgtctggatggactatgaagccgaagcggaagagttctgtctctttggctgagactgggtctatctagggatatcgatctttatgtatttagctctggccctggtggctcgcaattaatgtaatcaatgctttatgtctatgatgttttacttcaataagatcgaacacaaggttccttccttcaccacctggctcccaaccatttccaccttccagggctagttatatcactctcggttcaacctcttcttttctttcactcacttctatttcatcttcagttgatctcttcctttgctctcaatcgacatgacccctgcgagaggggacctgcctgtgatctagactatatcaaatgcgctcatggtggccttctcgaggctttggatgccaaatcgattgccaccccagagtttgtggagtgcccgcctctcaaatatcgcccgggatgccggagacgtcggggatatgttgcccgatgagtttaaccaagaccgtgctacttgggaacgtattgtgaggtctttcggagacctcgggagttggatggccgatgctcgtcttcctgatgaattaatattccacgctatcatacctaattccatgcagtaggaggagttgatacacgatctcaaccggccacgaccggctgaaccagatgtacggcaaagacggagaggcaaagcgactgaaccaaccacggccggaccgggcaaggtcggatcctttaccttacgtttgcattagagcctacgcctcagtacctggagtttctgataaatggcctttctccatatccacttgcatgggcttcttaacatcttcgagagtgcagatatgcttctcttcgggtttttgatatctgcgatcactcaccaaatctccaaggaagtagtcccaggttatgacgcagacaaaaaaaaggagggtgtttatctcgaggaggagagtccgagagatcctgactttgtgttgtgagagataactttcgtgcacttccattcgtttcttctatgtcattaattttctacgtcggcgagagtcttccctcgcaaagttcccattttcccgttcaaagtactcttctattgtgccgtagtcaatgcaaagtcaaaaggcaataagtaatagcagactagcccgttttatgtcgggctcaggagtcagaactccctgaatcgcttgctggagagaacacgcttaacaccgctgttaattcgactcggaatgttgacgctgggactgtgcctggagcggacgttcgatgcaattcttcggtggctgttcttctatgcggtcaacatccggacaattcgctttgtgtcctgatgactctcccattttcccttcagacatcatcccagacactgaatgtttcccttacggagagaagaaagacaaggagagcagtcattgcctctatcatatctgtcgcagctgggtaccatgcatagggagacggacggggcggacgcataaacaagatagcggaagtctggctgcggtactgggtatgtctctacccaaccgaggtgatctctcataggggccaggaatactatgacaattcaagtttattgagatggtagcataaaacttctatactccggagcagtgtgccccgctacaagcactgataatggcccactttgctaagacgtatctccttgggtaacgaagcggctattctaacggctattgagatttaggtatctgtatggagtacccgatcttccagttagaatgatgagtcgtaagatcggcgaaggggagataagctataatgtgttgtatatagtcaactgagcactaagccaataaatactccgtagcaagacataaaatatagtgcaagcagagctaagtcgaaatccaaaccatatcaatccataaaagactgctaaggaataatcttataagcaaccggggagattcttcctgattggctcctgaactccgcagcttcgacgcagattctagttctatcaaggtcagcagacttgaagatctttctcccatcacctaaataggttatccaggatgcaaggatctcgaaatgctgatcctctatttcttggctgtaagaagtcaagattgtacacgtgagagtcagagccctcatcgcctgtactttgacagtatacagaaggggagacttcaaagaagaagatagaaagatagaaagagagaagaatacagcaaaagaagcccgagttgtagatttcgggattcacgctgaacccggctatatccactcttcgccactgatgtaaacacggggagcttcatatctttttttcttgataacccctccatccctctacccctccagactcctcgccccaattccttcctccaacccactcacgatacatacaacatcatggcgcctccagctatcatcgccccttcaatcctcagcgccaacttcgccaatctgggccatgactgctccaagaagatggaagagggcgccgactggctgcacgtcgatattatggacggtcacttcgtgccgaatatgaccatcggctgccctgtcgtatctcaaattcgcggctgcgtcgatcgtccttccgaaccctgcggtcgtggcactttcgattgccacatgatgatcatggaggtgagttatggacttccccatacccgcgtcattccggcacggcatgagctctccccgctgacggtcctttgcttcgttatagccgcataaatgggtcgtcgagtttaagaaggccggttgcgatctttactgcttccactatgaggcggctgtttcttccgtcgccgcgaccgatcctacggataaagaaactaccgctcggactagccccaagcaattgattcgctatatccacgagcagggtatgcaggctggtatcgctattaagcccgatacccccgtcgatgtgctgtgggatattgttgagagcgaggaccccgccgaacgaccagacgtgagtcattgccagattgcccattcttccacaccgcttcatttcaattgaatgggactaactccgtttcacagatggttctagtcatgaccgtgcaccccggtttcggaggccagaaattcatggcttcggagcttcccaaggtcgccgccctgcgcaaacgctaccccgatctgaacatcgaagtcgacggaggcctcggcctgggtacaattgaccaggctgccgatgcaggtgctaacgtcatcgttgccggctctgcggtcttcggcgcacaagatcccggcgaagtcatcgcgaagctgcgcgaggctgtccagaagcgtcgcggcgcggagctgtagagacggtacatagcacaaaaggggttaaggtgtctttgtctcatttgaggggtggtctctttaattttttatattatacattcttaatcacgagttatgaatggcatttacatgtgggagtcaactgtccacgctttcgaggttatttacattttcatactgcatgtacgaaaaaatcgattgtaccttaccaggcattcttgatgtacagatgtcataatcgtcgaattcgtgaacagcgactccctcgatcctggaccggtagttgcctactccgacttctgtgtgggagacagccctcccttggtatcatccttagactccgacttgatttcttgcggcataggcgtcgcaagcatttcagcaatagcattgcccttaggctcattgggttccatgagctcttccttattctcgacggccacatcatcaacaactggcacctccttaatcgatggggacttcgatttccccgccttttccgcagcctctttgcgcagagcatcaatattgcccgtcggctctgcagagatggactgcctaatatcatgcaccgtcttgtcttgctccgcgttgtcgagtgttggaatcctggacgagcgatggtgtccaaccaatccgagcatctctgcgttatctgcgtggaagtttgccgaggatacggccgcttgttcggggactagggtcggacgtctcgtggcctgtgatgattccggcgcggtgtcgggcaattcgggggccaccgagccgcggtgcgcgcgactggcgacaggtacccctgtagcttgtgctttcgcgtctttcttatcgtctgacttggtcttcgccttggcggcagcctccgagctagcttggcgcagggccagcacggtcatatcgtctttcttgtcttcatgcttggtaacgggagggttttggatcttgatcgtggagggtttgagggtagttggtgtcgactcggctttgggctcggtcgccgggagaggatagctggtgggtggcattccacctaggtcctggacgctgtttactaccatacgcaattctccgaattcgttccattcttcgatctcttcaagatcctacaagtcgctggggttagcggtgttcctggtatattggtacgacagaactgcgtgaaatcggcatctatgcaaggggctgtcacatactcccacaatatcgccgtatttcaccaatcctggaatcttcttgcccttggagcgtcggccccagagcttgcgggcagcgtcgtcggtggcgacatcaatggcgcggaaggggattttgttcgctttgaggattgtctcaattctggaggtcgctgtgataatgtgcgacgaccccgcggtcagggaagtgtagaggtagagggttgagtcggacatgttggagctgtggtgttgatggtgtaattaatgggtgttgaggatgagagatagggtcttatggaaggaatactgaattcattcaggggttagtcttgtctttcctcttggattgagcttctacaggagaaaaataatttatttaccccctaggggatttgttatgacgtggcttggtgggtatcacgtgcagatgaatgctctctcgatttcagagggttctccccctatatatgtctgtagctgtacttggtctatgatgtataccaatcccctcagtcgagtacatctctccacacgagccgttccacatgtccaactgctatctttccaggaccccagtgtggcaacttgacgtcagatccagagatccaagtatcctggaatattctggttggtttcacctgttcgggttcagtctggaacaccaggtctattccgtgaacagcaacctgacatctctcaagaacatgcgccagccatggctatagttacctgtcacatgtttatcaaacatcatcttcggggccaaggtctgagcatgatcagcatgcctacccactaactaagctatagactttatgaagagttgggtaagaagcaggttttagtaacgtcaacttaaaacgtctttaggcacttctcgcacttcgggcactttccctattattagcaattcgataccagttggttcacgaggtcatcaagtaatccaatcatgggagtgttattgataacggtttggactggtcttggcggaagtgccgaaatacaaagattctacacccgtatgggatgaataatcccttactacctgagagtacccaacaacagcccgatatatattgtattctgtgagtgtggtcacaagcacacgagacggatagtgcacacctataatagttcctcgtatccactcaaataagcaccaggtgtccctgtgttatagtaggctgcagaaatatatatccacggtcctttagaggaagagcctaagagcctcgaaggacgcgtcctacactggaggcgcagcgatatgcagaaagcacaccaatcatgctagtaggcaaagaaaatgaacctactgacacaaacttctcgcctgcttggaaaccaggccacggaacttgcatggaagctcgatctatgctttccccgagtcatgaaactgcagcccagctcaactcattcggcgtctgggatctattactattggagccggctcgctttcttctatcgcttgtcggcaaatcggccgagctgtcccatgtcacgcgatcgacatggggaagcaggctgcatctatacgtttaaatccagggagggcggactgtgggtgcgaagtatacgaattgaaaggcgttaacttggaggatatgggttctcaagccgttctatcacgaattaatactacgctcggggagtcaatatcattagtcaatatcatcagctgagacttaggcacgagcttacttattaaatcaatattccgtatagctctcccattccaatgcaatgcattagaatgacttgtcccgtgcacacgaccaggaatttacagcctatcatccaaggtggctgaaaggtggctcatcgatgggtttctagtcggacccgagacaacctctgactgcaggcatcagcttaaaagctagcattaatgcaggggcagacttatcagcgtctgggccatgtaacacccgcagagccacgagctttgacatggcgcaggtaatcacgcaagagccccgtaccctgtcaatccgttctccccgtagaatgacgaagtcggtcaaggatttgagttgacggtgagagcaaattcgtgtcgaatgtggggaggactcttagcttatcatgtatgtaggcgatagatgatcaaaccgaaattcgcccattcgacgggagtgatcccgcctgtctcgggataggaaaaatgatccatcgtcgaaatttacaatgttgtatgaagtacgaaatactacggtgaagaatttcctgttaggtgcaagaatgtctagccggcgatcctcattgactaccccatacagattgctccgtggccatgttgtgttcactctaagagctatcctgaaacagatcgacgtgatcgcggagggaggtacggagtccattttcgatgagcccgagattgccgctctataatgtaaggaatctattgccggcacaacatagtcgccaacgctcaacatcatagcggatcaataaatgtccaaccattatccgatcaggagaccgatccacctcagaccgtggagcctctgtactagtcaccactaacctcgtgtatcccgaatagtctcgatacggcgtatcggaggggtcaatcgatagcgtgtagacaggcatgaaagagaccataattgggaacatcgactacaacatatgagaacaccctgttgtatatttgataggggccatccctgacaagcataaacatgaaccgtgggactgcggcgggaaccttgcaacgacccacggtaacacggtaacacgtgaatcgaaccgttcgacactctatttcctcggctatgttgtacttcctcattaatcacgctattatcctttgctagtcatctcgatcggacattgggcgctgacctagggagccaaacagcgtcatctgcaggatgccccagctgccacgccagacgacgtggcagttcttggtccgaccgtagcaaatggatcctagggggttgtttcggagtatggcggtgctggaccggaaaacggaggggttttgtagtttctttcatgctcccgctgtaggcgcttgctacttgaggggccagtgacttggttatatgtatggtgtcatgtaccccggtttacatgtatcaggtcaccttttcgtaagcaaggacgcatctgctggctcggaccactctcggggtgatccggttcgctgcctcacttttagttccttttcgttctcggccgtctgcagcttcgcacccagcaggatctcgcttctagcaggtgtcggccctcttacccgggtgcatgcctctgggacatgggcttgctgatgacctcgccacggataaactttgcggccatgatattttattaaaaaagcagaaaattaccggaaagagaaatacatgactacccgaacatctcagggtccagacccgatcaccggcttccacgtttctgggagcacggagtatagtacggagtagtctctgcttgccaattctcgtatctctctttgtggggagtgtccttcatcgtcgatcagaacttttgtcttcttttatctactcgtcggcccaatctgcatttgcttcttctcccaacttgccatattgtctaattgtttttatccttcactatacagcagaccgtggtacattcatcgcaacgcagatcttcgacgattgcattgataagctcagctttccacccgcgcagcttcgacttaattttttttattactattgcgcttcagttctacgtacgcatttcttacctattctctcgcgcaaagcatgcgctaactattcgcagaatacaacccacccttctccatccattttattgctgatagacagttacttcccggccattgcgaggaacccattgcgccatgactgtcaatctggatgacgaactgttcaccagtgccatctccggataccacgaggcgtttttggtccaacactcccacctcccggaagatgaacgaaatcagctctggattgaacggctgagtcagttcatcccgaccaacgaccgggattccaactggcagccagctgggagcctggggaaacggaatcgacaggatgcgacaccacggacgttgccatgttgtgatttgggtcttcctcaggcaaaacggagagccaccgtatgtgtgaccttggttacttgctccagccttctcctcgcgctcgcgtctcctcacttcaaccgccattcgtccttggattgacaattggcagaccccggatctctcagtcgattgcccacgcgacctctcctacgcctgccccgcagacccacctcggaacggcgctgccttcgcgggacaagactcctaccgacacacgccgatggtgcgctcccagagccagcaaataccggtctcccaccagcaccaccccaccggtgccgccataggtaaacgtcaatccttcggcctggtacggacccatcgcctcgaccatgtcgacgaattttcgccatccgatttcgcaaagtatttggacgttcctcccagtcaaccctgtgactcggcgttgactttcggactcgcaaatcatggacaacccggacctttccctcaataccctgaccggacgcccccctggaccgaccaggccccagcagctgcgccggagatgtcccgcagcacgaccgccgactccttagttggtggaatcaacatgatccgcttcgactcgaccggaccagctcagtatcaagaaccgaccgactccgtcccgccggactgggtgcctcctacctccggcctgccgtatcaagactcctttctctcccccgtgtaccctgacctagatcccacatcgtcttccccattctcccattctcccttctctcacccatcgtccttctccaacctaccattctcggcatctgctcccccagccgcctcctctcgctacccaatgccccacaatcgcctcctcttcgactgcatcgacggccataccctggcctcacagcgctcccgggctgtgcgacgcaccaaagagcaaatcgcccaagccacgcgccgcattgctccaaaggtcgagtctgtcgccagcagcatgtcccagatcgataaccacaagatggtccgcatctcctcagcagacggcacaacaaaggaagtcgccgctatccccaaggcctccgtgcgacgaccgccacgaccaaagacatactgccgcatctgcacggaccatccggacgggttccacggcgagcacgagctgcgccgccatatcgagcgcgtgcacgcttccgtccgcacggtctgggtctgccgtgatatctcgcctggcaagtacttccttgcaaattgcaaggcttgtcgcaatgggaagcgctacggtgccaattacaacgcggctgcacatttgcgccgcacgcatttcaatccctgtgagcggggccgcgggggccgcgggaaagatagcgagaagcgcggcgggaagggcggaggtaatcagcccggcatggatgttttgaaacattggatggttgccgcagaggaagtcaccgaggcggctggcgatggcaccaactcgaagcttctgattcggaatcccacgcatctttcgactagggaccctgggtatcaacttgctgttgctgcttgtggcctggttgagggtcagcctccttatgttgtggagtccgctccgctgaaggagtctgaccaattccccgagtttcccgatgttccgtttgagttcgattttgagatggatcttgatctcgacctcgacatcgatgagtcggaagattcctcattatccggttcgcaggcatcctgcacgcctgatactgattcatatctcaagtgagcaatcgtagtctgcttcattttgccactgggtttttttacgacagtttgtccaaagcactgtatgatcgagttcgtgtactgtactttgggctgtggttaatggtctctgggatttaggggttcgatcttttggctttatatcttgtttctttggcgactttgtatatcgtgtgatactggcattggcattcggtggagcgttcggtggagaccaattctcacagggcgtactgacagtaagaaggtgatctttgataatcaatggcacttgcaggtacaccgttgcaattgtattcagccctgtacttgtagcaggtacaagcatcagagtgttgcgtggtatgaggatgcaggtaccgggtactgcccaggcagcaacaataccggcggtgagtgccaagagtcagacacggactgtgagtggctgaccatcgccgggagtggagtccggtgtgacccggtggccgatcctcagccaatggaatgccgcccaagggatgcaattcgtggctgacggcctttgttggcgatagggctggcagaactgtggctggtagaacttaggtgatactgtggcctaagggccgatgggtatgtctgaggtactgcgatgttagtaatccgattgttgctagttggaaatagaagtattcgcctgcaaatgtctcaagcaccgagatagaagcaaaaaaaggccaagaatcaatatttactagcaaatcggcccgtgtggagaagcaggggaaaggaggagagacaaaaaggtacttcaaaggtacctcagccctggagtcttggcggccaaatgcccctatcgggcgcaccggtcaggtacctctcaagtaccccgacaatttccttcttacctgcaatacaacctcgagaaagtaagttgcctttttctcctttctgacactcttaatctcacatcttcgcatcttcaccttcatctctttccacctcttcaatcgcttattttggctcatcacagcctccccctttcgaccaatctctgtcttcgccttatcccaggtacgtggatttagctgctgtggtagccattcatgcaccgtgaccctggtctcatcaaaggcgccgcaaattttgatgttgtataatgttgattgtgatcagtcgctgattcgttctacctcgattttagaagattacctcccgctgccatgtcttatgcgcagcagcagcctccgtatgggtaccagcctggcgctccgcaaggatatggaccccctccgcctggccctcagccggggtaagtcagcacctatcagcccagaactcgattttcgccgtcttgccaggaccaaccattggcgataccgaaaccgagaccgatcggcttctgtacgctttgcgaccgcaaaacttgtcgcctggtctgcggcgagctcatgtcttggtcaatactttggacatggtgctgatcaacttgcaaatgcagatactaccagcagcctggatatgaccagcaaggccagtacccgcaaggccagtaccctcagtacgcccaaggccagcctggtggagtaagtgttgacaattaaccacccaagccacacacacttaccgataaacagatgcaatacccaaaccaagctcctcctccacctcaacagcctcaagaacaaaaatctgaccggggatgtctcatgggttggtaagtaaccatattgtcggtgaaggtgggaacaacactaatctgagctcttttctttcagtctggccgcgatgtgctgttgcttggccctcgacgattgctgcgaatgctgcgacgagtgctgctaaactctatgacccatgacatcgacgatacctttcttcttgcaggcgttgggatttttcgatatgcccacaacattccaggacagaacactgcgctttctgaataccaataatctcctttgtgtctgttgcattgggctttcattgctctgggagaaatactccagtccggtcaattctagctttaagtattcgttcattgcgttcaagagtttatttgagatcttacaacatacataattatccgttgctcagatacatgcgcgtatgcattgaaatgcactcaagatatccattatcacattggatatatccaaatattgttacaccatatgccgacgatcgtctaatgcttaatctctgtttttgtgctcaaactggcgatcttgaactttcaatagtctcaaagtatccattcctgtcaagctgaatgcttgacaaatcttgtgtctgttggaactggcgatcacgcataagtccccacgaatgacaatttgctcaagtttctttcaaagacattggtcagaatggcgactaaaccccaagctacccagcgtagcttcatggcccgataaagcaatgaggtaaagggaaaacgttaccaagcatcgaaccgaaagaatcgccatctggcaaaacacagattgccttgaagctacgtatcaaacaggagagatctatctagattgtgctattttttggctttctgcggtggatatggagtctccaacagacataccagacggtggccgatcagcttgcaatcggccttcgcgataggatgtaaagagccgtctcagagatccctgagcaggccaaccgctggacgatggctgttaattcttgataatgccgataatattgatatgtggattgaaagcaagaattcaacaactggagggttcaaaaattacctccccaggagtgaccaaggcgtcatcgtcttcactacagagtactcgaagcaacaaagtagctcaacatcttacccaacaacgtcattcgaattcccgaaatggacgagcaaagagctactcatgtattgcgcaactccttgattgacaaggaattcctttacgatactgaaaatagcccagagcttctcgagcaattgacttgtgtccctttggctagtgtgcaagcagcttcatttatcaacgagaacagcatgacaatcgctagctatgttaagcttttagtcggacaagagcagagtgccatcgatcttctgagccaggactttgaggtcgatgcaaaagcattcgaaaccctgtcgtgaccacatgggtcacataatttgagcgaattcgacgacaaaatcctcccgctgccgactatctctctctgctttctggcctgtatccaaagagaaggatattccgatattgtcccttccgccggcgtccaatgtcgaacagaaaaaggtgatcggtgttctcagctccttttgctttgtacgtgccacgcatgaagattcttgccttgatatgcatcgcttagttcatcttgcaagaaactggctgcaatcagtagacatcctccgaaagtcaattggatggtttacgtgggctagatgcctggttcccctttactgatgtggcagattatgagccagtggtgagtatgtgtccctcatgcactccaggtccttgatctaacggtaggagaggacccatcttccgaggatgcgtttttttgttcaagttagccagatgtcaaatgactgatcgaagatacaaagaagctagaaaacttctcaccggggatgtcaaaatttcagagagaatttttgggcccgaaagcgcatggactatttaggatcttgattgggtggcgattggctgttcatggcaagggtagccggagaaggcaatcaaaataagcgaggactggaaaaaccgcagaagagacttcaatagcatccaagctgtccgggctctgcaccggtatcggctatgtacacgcttttgaacaccacaagtctgcagagctttgcaggaatgttatcccacatcatatcaaagcatttagtgtgggctcatttgagacgactgatgctataggttgcctgttcatggattgctggtcccatggatactcttggatgtgtcagagctagccattctagtactgcatatctacagaaaggtcatcggatcggccaatcccagaacggtgatggtcatggtaacaatggcaagtatatatacggacggatggcagcataaaggggccggatcattgctaaccgaggcccttgagatccaaattccattattggatgtgagtatccctcaattctccagacaatggcgtacggatcaactacatggttgtttacgcaaagatgcagttgccccgagaaaaggtacgtccggtttagcgcgcaacgctatggcttagatcacggagttactcggctcaatacgtatctgtggagcagtggatgacgaagtcgaagcaagtttctcgttgctgtactccgctgatacatgcactaaaattgtggtacaagagcattcaattccttcatgggcagatgtttttctcgtgtttaggcgaatatgataatagaccgaagaagcccttacccgaaagtcaaggtgtatggcctctattatgcgtggcagccaagaaatgatctcctcctgcgtgaaatccaaaaagccataaaggatatgcccgcaaacgggcagatcccgagtggagaactcagatcatcagttgaaggtcagcaagttaaggaatcctacgacagcatgatctcgacaagtctcccaatcatctttaagggcacaagaacttagggtcttctttgtatgactgtcatacattttcactgctctcaagtgaacctcatcctgtaatagttgaagatacgaatgtaaataggaagtaaaatatatatttcgtggtatataaagaagtcttcaggcgagttgcttttatatcttcggagtcgccgctgctctcgagccttgccggtcacataaatccttgtcagccactgggcagcaagagccaattatgtaattcaattaagtaaccttccagctggaaccagaagaccaaaatagtcggccgaacttgcgccgtttctctttgggaataacacaatccatttagctcgacagcagtctttttacttgtccttttgctatatatcgtctcccctttctcacgttttctatgcgtaacctttgaaatttcgctatgaccgcgttctccacccgcgagccgtcggacggtcaataagtagttagcctgtgatccgaaattgtttcctaaacgagggctgcgccgagcgctttgctatattcggttgccacaccccgaaccaatcttgatttgcacgactctcgactctgattcatggagattttccgagtttataaggggtaatgggcccgtggaccaatcagcggcagggaccgttggatgtgccgaccactttcattatcaatctcccaaccaagcgagacaaatgaggcaattccatgattcatgaccggaagacgagggagtatccacagttaatatggattcttgcagccaagaggccaagcgaagcttgagaccgacgctgcaaagcttattgtggtcgacgcttacccgctcgggcctagcgctcgctagataagatgagggcgacatctgattagatctgccctgtttcgctgtgatttgccggtggggcaagccctaggctagcagccctggaatgcgctgatgagtggatataattaatttcaccaaatcaccgctagaggccaaaggccgattttgctatgcgggtcacgacaccgcgtgtttttttcactgtctcggtgtcccatccgaactgtgccgatctcgggactttgtatactataagtgcaacgggcgccccattatttccaatcttgtactgaacgcttgtttaattttacctcttcaatatgggcgtccgtcttttgatccgaagggcccgaacggtcttcagccgtatggcggcctctgacgctgcaagctcaaccgacatacctcccccagcggatggaatccaaccaagcaagatagatcctgccaccgacacagaacttcaacaggcggatatgccgggggaagacctccaacatggtgtccgcgatattgaggccatcaccttgacctggtccaagacaaccttggctctggtttttatcaagtaagccgtttccctagacaatagttaagcttgaacagttgctaaagcagtcgattatagtatctggttcctatattttgtcaacgccttccaatcttcagtcttctccagcttgagcccttacgtgtccagttccttctcggctcactcactgtctggtgtgcctgttgcgcttgccgatgcttttgcggcagcaagttatatccccgtcggaaagatgatggatacctggggccgtgcagaggggtttttgctgatgacatgtttcgctacactgggattgattctcttggcctcttgcaacagttttgccatctactgtactggatatgtaagactgccatttattctgagatactcctcagaacgaacctcctttgcacatacttacggtcgagtactaggtcttttacaatctcggattcagcggcatggaatactccattgatgtggtgaccgccgatgcctcccaactgaagaaccgaggcctcgcgtatgccttcacttcttcaccatacattattactgcatttgccggagcaaaggtagcagatgagttctactaccaggtcagctggcgatggggcctgggttgttgggctatcatcttccccattgtggcggcgcctttgtacttcatcctcaagaccactctccgcaaagcggaaagggaaggtcatcggatcaaggaaaaaagtggtcgcacatttttgcaaggtgtctggtattggactatgcagtttgattgtgagtattacctttctctatcatttcggtgcacatatcccgccggtcggacattatcgacaagacttcccaatttcaaccatttacttcttcaaacagacactaatctcgaacagtgcctggtgttttcatgtttactggtggactagtcatcttcgaacttcctttcgatatcgcaagtgaagcacccaatggctggggctcggattatatcatcgccatgcttgctgtcgggttctcgatgctctttttcttcgccatctacgaaaattggatagctcccgtgcctttgctcaacattaccttcctcaccgaccgaaccgttgtcggtgcctgtcttctggatgccacctatcagctatccttctactgctggaacaactacttcacctccttcctccaggtggtcaacggcctaacgattgccgaggctggatacgtgaataacacattcgatgtcgtgtccggtgtcttactcttcttcgtcggctgggctatccgaaagaccggtcggttcaagtggttgttatacatctctgttcccctttacatctttgctcagggattgatgatctatttccgtaagcctggtatgcgcgtcggataccaggttatgtgccagattttcatttcgatcggcggttcgatctttattatcgtcgagcagatttctattttggctgccgtagatcatcaacacgtcgctgctgcattggctttgttgaacgttgttggtactatcggcgactccgccggttacactatttgcacagctatctggactaataccttccccggcgctcttgcgagatacctcccagcgtctgaattgtcaaacttggacaacatttacgaagacatcacagtgcagactagctatcccatggggagcgaggtcagactggctatccaggccgcttacggctattccgaagtcattatgctttcggttggtgtgggtatcatgggtctggccatcatttggaccatgttgatcaaaaacctcaatctcaaggagatcgcccaggtcaagggtactgtcttctaaggatcctttgagatagcaatggtgtccggttggatatctggctgtgcgcatcatactgttcccttcttccatgatccccgggaggatacactcgcagcagcaatcactcattatcgctaattccctgatgtttcttgttttccgtttgttgtctttttcgtctgccgatgtctactcccgatccggggggaaagcatggccatattgtccacgatttactgaatcagatgttcacccataacttgaagtgggacagctggaattgatctttcaggcggccatttcaggatagagaaagatcaggtctgatcatgattacctttcaatgtacaaataggttgataccacatccatatataccaatgtcatggaagaccagttgtttatccaagcgagattattatttgcaagagctttacatgtacaattaatactacaggaatagggtctatcaccgatatttctgaattcaatcagattataaatctttcatacttggtgtagctaactaccactctaccaccattacgtataacaagcggctattctaatcctaattctcaacactccaaccccctttttattcgcgaattattagctaaatgtaaagctgcatagaaattttctgcaagacacaatggaaacatccaggagcaggcaaaaaaccgggggaaaggcacagtccggggaagaatggaggatctgcggagaaaggctggatttacccgtcaatcacaactcacatcctcagtcatggccgtgaccaactacccctcaactgcagccaaggtagacgcgtctcttgtgcggtgctcgctctcgaatcaacacgaagagccggaaattacttgcaggaataagcctcggcacctttcctgccaagatgctgcagcggtattgcatcgcccacgcaaggaacacaccattacgacacacgttggccttactcgcaccaaacctcccctaggcggtgtatacatattgcatctgtcttgatccatgcacccccgtggagatttacctcattgggaatgaagtgtcggtattgcggtcgattcggcagattgttttgtgcaaaggaagagatccagtcatggccctcgaacccctcatggagatttacttcattgggaacaaaacctcggtcttacagtaggtgtcggcagatgttctgcccaaaggaagacataatgttatgacccttaggtgtcacctcgatccatccgggtcaattggagtacaatgaggagcgcaggtaattatccggcagggcactcctcgctgggagattgagcttcctccatataaatatccgttacagcgcgcattttactcagactccctgaatttcaaatagcattggctaattgggactaaacacgaaaaatgctgcacaaatatcttcttctgccgcttttggcgtcatatggtgccgcggtcactatttctgtagcaaaatctggaggcaatgctacatcaggtctgcaatatggtgcaatggaagaggtaggttgagcttcgtgtcaattgttatcggatctaattcaaggtttaggaaatcaaccattgtggcgaaggaggtctctatgctgaattgatccgaaacagagcattccaaggaagtccaaagttcccttcatcattggacgcctggtctggtgttggggactcatcgctgtccctaaagaacctcactgacccactgtctactgcccttccaacttcaatcaatgtcaagggtactggcacaactgggttgactaatgcgggtttctggggaattgacgtccgtcctcagaagtatactgggtcattctatgtgaaaggctcttactcgggctccttcacggcttctctcctctcgtccagcggcgaagttttggccactactaagattgcttcaaagagtgttgcagatgactgggtgcagcatgattttgttcttactcccaaagcaaaggcttccgataccaagaatacgttctccctgaccttcgatggctcggtaagatttgggataggggacttgctatgcacctcggctaattccatctagagcgcatcgaatggctcacttgattttaatctgatcagcttattcccacccacatggaatgatcgccccaatggcatgcggaaagacttgatgcaagccatggccgatatgggccccgtaagtcaaaatcttactattgccttggaaaagcccaatgatccgggatgctaataatcttgatagaaattcctccgcttccctggtggaaataacctcgagggtgacagcatcgacggacgctggaagtggaacgaaaccattggaccactcacagaccgacctggtcgcgcaaccacttggcaataccaagagacccttggattaggcttggttgagtatatggagtggtgcgacgatcttggaatggagcctagtaagtacattattttgccatattttgcctacatagctgacaaaatatgtctagtcctggcggtttgggctggactcgctctgaacggagaagttgtccccgaggcagatctcgatttctatgtgcaagatgccctcaatgagatcgagttcttgactggctctgttgataccgagtacggcgctctgcgtgccaaggttggacacccagaaccctggacaattcggtatgtcgaggttggaaatgaggatatgctgagtagtggtctggcatcgtacgagtcctacaggttctcggccttctacgaggctattacggccaagtaccccgatatccaggtccttgcatctactatagatatcacgattcctggaaatgcaggtggtgattaccatttgtatgatgtcccggataacttcgtcagcaagttccacatgttcgatagttatacatccgagcatcctattttgcttggtaagtcaataagtatacctgcgagatatgaactaacacacatcaaggtgagattgctgttactgagtcaaataacggagttggcattgactggagcaacactcatttcggtctgtacccttggtggatcggctccattgccgaggctgtgttccttcttggtgctgagcgcaacgcagacgcgattattggaactacctatgtgagttgtgtcaacttaagttttagtagaagagaactgacaaagcaataggctcccttcttgatgaacttggacagctaccaatggtccccgaccatcctctcgttcaactccgatcccgaccagacagctcgctccactagttggcacctgtacaccgtatgttaaactcttatcaggccttcaaagtaacatccactgacatgagatgcgaaaatagctgttcaaccacaacctcatgacaaacaccctcccatccacttcctccgacgacttcggtcctctgtactatgcaacaggtctgaacagcaagaccaactcgcacatcttcaaggcagcagtatacaacagcacatccgatgtgcctgtatcactgaccttcgagggtgtcggccgtggaaccaaggcagacttgaccatcttgactgcgccagatccattttcggtgaacgaggtgggcgggacgaatatcgtcaacagcaagactacccagattaaggctggcaagaagggcgagttctcattcaagctaccgaatctgagtattgctgtgctcactaccagttaatgtatcgtcaatattctaggatgtttgcgtatgcagagcatgactcaaatatattgccttccggtttccgggcttaacggattactgtatatggagtagattttcgtcagactgaaagactcagccttgatattcgtattctaaaatagccattttctatattctaagctatatccttccaacatctaccacctgtctgtcacattgagtaccggcactctgggctatgcaatcaccatgatctatttccgccagttaccacctctatgtatttcttcggggagtccctttcccgacccatgcgagttcggggccgcgtatcaatcgatcaatcgtgtctgcgcgaggcgtgtgttgacctcaccatgaacaccacgcctattccctatactcccttgcggggctcattcgggtgcgggtgcatgttcgttacttgccgcccgcacgctccagaccctttccgcgagtgaagattgcagcgacggtcgcgatgaatgcaaagatcgcggaggccatgaaggagagtctgattccgcggtagtacaccagccgagcggctaattgcacatccgggggaagatcataaatagccgagactgagtggcggatctcatcgatcacctaggagggagcgagtatattggtcagcaaggcttattcagcggctcgttatcatcaaacggcgaaggaattgtactttccatttgtctggtattccactcaaggcctcaccgaggcctgagttaagtgtattctgcatgatggtggaggtcactgcgacgccccaaacattcccgagggagcggatgaggtagacggttgaggcggagacggcgtgatctagatacgatattgttagcaggcttgcttggcaaatagctcggtcgctcgctgatccgggtaatgggctagcgacaaggatagggaaagtgccttaccggcgtgatcaaaggctgctaggaatgtgaacaggatccctgggtacaccatcccctgacccaggttggcgggaatcacatagacgagatacttccatcccgagtcgttgaatcggaggagcatgacgagcacattgccgaagagcattagggctgcgccgacgcgtacaatggaggataatctgccccagcgcgacatgatgattcccgctataagaccacccagtggggtgaatagacagggaatcaccagtcgggtgccagccttgctgggtgagtcaagaaggatcacctggaacatgagagggagagtaaatagatactgaatgattcgcgttagttacgatgctcataatagtggagcgggtgagcttactgcatatgctgccatcccgacacaaacgttggcaatctgtgtggatacagcgagctgtcctcgtagcatcttcaatggaatcagaggtgcagcggtggttttcgcttcaacagcgacaaatgcagccagcaataccacgctagagaccaatggcagaattacccacaggtgagtccaaggaagaatgttaccacccaggctgagcccgaccagctgaaccgatagagccagaatgagcagacaagcgcccagaacatcgatttggtgccaaattcctcgggttcgaccgggggaggattcagtgtggcgtgttgggaactttagaactacatagcccatgaccaatgcgaacaaagagactgggacctgcagcaggaagcaccagcgccatccgatcgagtcaacgatggcacctccaaaagaagccccacagatagctccgaagccgtacgagacgttctggattgcctggtacatgccgcgttggcggaagggaatgatatcggagttgatgattgttgctaggatgcttgttagtgagtgatatgtcaattgaaagatcatcgacttacccatagtcatcaatcctccgcctccaatgcccgtcaaggcgcgcatgatgtttagaaagattacatcgtgggccacagcacatcccagacaaccagccatgaaggtgatggttgcagtgaagaaacaagaccggcgaccgagtatatcggagaatcggccataaagaggctggaatgcggtgcttgtgatcaagtacgaggtagttagccacgaagcagtgttcgcggcgttgaactcggagctgataacagcataggttgaggcagtgatggtgccgtcaaatccgccaagaaacacattggccatgattgctgttgattgttagattctgcttgatcgtgtatatattttggtcgaacttaccgatttggatcagtagaaaccctggtggtgggctccaagttgcaggaactggatccgatcgcaataaaggttgctcttcgctttcttgtgctgacgatctttcgacttcattctcgtgcggcatcacgccggccgaagcactttcattcggattcaatgccattgtcgatttcaaaattcagaccacagatttgcgattcagaagatgacgaaggacgaaagaagggcctggccgaatatcggaaacttcagagatttcagacgcgcttgatcgggaaatgcgagcggattatcttctatcttccccgccaagtgccaagcacgacatcgtattccactgtgacatgatcaccaactattttaacgagatctgatggatgtgggcgattttttcttctcttctctctctacacaactattcaaaccaaagaagtcaaagtgactcagtgcagagtacccatctaaggttaatgtaccctatcatgcacgaaatgaccagaatcatggaaactgattgctggaccagtacttatcatgaagctccttgaagccgttgcctacactgcagtgctgttgccgctggccgcagcagactggcagttcaaatctcgaaccgacctggccccgcctcgtctgaacatcaccatcccggcgacaaaggatgtcgagaagggttacctcttcatcgcacctttcccgggccagtgggctgagccgcagtttcatggtccgcggcaggaagctccgtatattgttcgtgatgatggtgagctcgtctggtcgggttatacctacttctccatctgggccgccaacttccagaaggccagatggaatggtcaggatgtgctgttcagctttgagggcgatcataacccggcctatggacatgggcatggtcatgctaccattttgaatcagcgctatgagactattcgagagctccgcgctggtaatcacaagcttatggataagcatgaattccatgttgttgatgagaaaactgcgttgcttcaggtctatcagcctgtgccgagagatctgtctcgctggggtgctagtgccgagcagcagtggattgttgatgccatcttccaaggtatgtttgtttcagaatatatgaagagttgttgctaattcgcagtagagttggaccttaacactggagaactgctatttgagtggtctagcctcgagcatgtttcccccgatggtaagtcaattacctctaacccttatggtggactggtctgacatcgtacagaggcggtcctccctctcaacccgggacaagcgggtgcaggctataactcatcggacgcatgggactacttccacatcaactctgtggacaaggatatcgaaggaaattacctgatttctgcgcgggatgcttgcgcagtccataagattaacggtaccaccggtgagatcatctggcggctgggtggcctacgctcagactttgagctcggtcccaacgtcaaattctgcttccagcatcatgcgcgctttgtcgagcagggtgatgatgaggaggtcatctcgctgtttgataactccgctcatggaacagagaatcatcgtggcaaagaggtccacacccatcctttctcgcagggcaaggttatttctgtcaacactgccacctggactgcgaagattgttcaagccttccaacctcccgatgggctcctcgccaagtcccaaggtagcactcagcttctgcccaacggcaatgccctagtcaattggggctctgagggagctatgaccgaattccgggcggacggtactccgatctttcacgcttacatggactcaggactgctgggcgagggtgtccagaactaccgggcattccggtacaactggaccggtctgcccacagaagagccggccatcgtggctgagaagacctcctccggcatcgaaattttcgtttcatggaatggtgacactgagacggcggtttggcgattctacgccgtcacggatggatttggttcccgggagttcttgggcgaggctacacgtgatggatttgagacttccttctcgcttcctggtcactcataccaacgcttggcggctgaggctgtctcggctcgtggtcgtgtcttgactaccactcgtgctactcgtgtccaggacgcggtgctcccctacggtagtgttattgcggggtccgaggaccgcgactcctggagagagttgattttgcaggcatagatgaagacaggtctgtgtactaggctctatagggagttgaatgaggtgcggtgaggagcatagagtagtttggagcagtgtcacatgatcttatcatctttttacccttgagctttttgttctgtgtaattcattagactttggtatcgcagtatagcgaccactgcgagtggtattgtagctgaaaataagatattcatgtcggaatgcatctacaatggcgaaagggtatcgtctatggtatagtctatcaggtatatactacatactctcggatgctcacaactccgagccaaactcgtatattggccgaatccgagatccattaaccgaaaagggaagttgctatgaaccgtggaatataaggcgtgagggtgaggggtccaatgctactacgcagccaatcaggaggcgggaaaacaccttaatatggaggttatgtgtatatactatcgagaattaatgccatgtgacatccaaatagagattcagagatgggaatattcccttattcagctggcatggagatgttcatgcagtgtagtacatgaatcctccgtttccctccatttccggaaagagctgagacggtccatccatggatgttgcggcttttccctctttcctcttgaggattctcgggtctgtcactttccggctgccgtcgttctttccttctgtctcttgtcatcttccttcggtccttcgttccttcttctcttcttccttcctcctgccatcctttctatcaacactcatctgtcgcgtctcacattttgtttttctcttctgtcaacaactctcgtttaccttcttgaccgtgtcccttcatggcttcacgtcttcttccatctttgggcttttcgccgactctgctcatgccagacccgatggaaaacgtgtcggacaatggtgccgttgatacccccggggtgaagaccccagtgtctgagctctgtgatgatgatcgcgacgggcaaataaccactcttgcacgttctctttcacagatctcgcgacagggcagtggcaaggccagtgaaacctcagagggtgtcaacactttcctcgaccctacccatgatccagagctcgatcccaatggtgaccagttcaaatcgcgtaaatgggtgaagaacttcatccagatgacctctcacgacccagatcggtacccgcgtcgcacagcaggggtctccttccgcaacctcaatgttttcggctatggaaccgcggctgattaccagatgaacttcgccaatttctggctcaaaggcacaggatggtttcgcagtatccttggcctccagaagaaagtacgcattgagatcctgcgagacttcgaaggcatcgttcacagtggtgagatgctggttgtactaggtcgcccgggaaggtatatgaatcgacgctccccgcgaaaaactaattactaacggccaaaagcggatgctctaccttcctaaagacgattgccggagagacacatggcctctatctcgataaagagaaagggtccgaggtacagtatgaaggaatgtcctgggatcatatgcacagccgtttccgcggcgaggtcatctaccaagccgaaaacgaagttcatttccctcagctgacagtcggtgatacattgctgtttgccgcttacgctcgagcgccgaggaaccgactgcccggtgttacacgcgaccagtatgcgatacatatgcgagatgtggtaatggcaatgcttggcttgacccataccatgaacaccaaggtgggtaatgagttcattcgaggtgtttccggtggggaaagaaagcgggtcagcattgccgaaaccactctatgtcgctgccctttacagtgttgggacaacagcactcgtggacttgacagctcgacggccctggaatttgttaagaacatccgcctctccactgactataccggatccaccgcattagttgcagtatatcaagcgagtcaatctatctacgacctctttgacaaagcgattgtgctctatgaaggccgtcagatctatttcggcagtgcgcccgatgcccgacgcttctttaccgagatgggattccattgcccagaaagacaaaccactgcggactttctcacttccctaaccagcccttcggaacgcctgattcgcccagggtttgaagactccgttccacgtacacccgatgagtttgcagcacgctggaaggacagcccagagcgtaagcagctgcttgctgagattgaagcaaacgcagccgaaaacaccgctagagaaacaaaggttgagcaattcagtcgctctcgtgcagcagacaaatctaggtttactcgtgcagcctccccatacaccctgtcgtatccgatgcaaatccgcctctgtctctggcgagggttcttgcggcttaaggcagacatggctatgacgctcgcgactctcattggaaataccagcgcatctctgatcattgctagtcttttcttcaacctagcgctcaataccgacagcttctacaagcgtgcagcattacttttctttgccatcatgattagtgccttctctagctcactcgaaatcttgatcatgtggcagcagcggccgatcgtggaaaaacattacaagtacgcagcataccatccctcggcggaagctatcagcgcgtggcttgtggaaatcccatcaaagcttttactggcagttgtattcaatttgatcatctatttcatccctcatctccggcgaactgcacctcatttcttcatcttcttccttttttcagcaatgacgacgcttgtgatgtccaatatcttccggtttatcggcgcaatctcacgttccgtggcccaggccatgcctcctgcttcagtgttcatgcttatcttggtcatttatactgggtttacaattcctgtccgagatatgcacccatggttccggtggctcaactatgtgaaccccattgctgtaatgataacttagcttttgttaggccccaccagaatatgctaacacgagacagtatgcctttgaggccctgatgatcaatgaatttggtggccgatccttcccatgctcgaactttgtccccggtggcttggaaatttacaacaatgcgcctctcagctctagaatttgctcgcagaagggtgctgtggcaggccaggatttcattgatggagagacgtacattaacaccacttacgaatactacagcccgcatctgtggcgaaacttcggcattctctgcgctttctttgtgggcttctttgtgctgtacgtcttctgcagtgagctcatccgcgctaaaccatccaaaggtgaagtcctggtatttccgcgtggtaaggtccctgcttttgtcaagaatgttcgaaatgaggatccagaggaagtcattgcatcagagaaaggtgcagttgctagcgaacctcaggactcgaccgcagcaattgttcgccaaacttccatcttccattgggaaaatgtgtgctttgacatcaagatcaaggggaccgagcgatgtatactagatagcgtggatggttgggtcaagcccggcactctgacggccttgatgggtgtcactggtgcagggaagacatccttactcgatgtcttagccaatcgtgtcactatcggtgtcgtctccggtgagatgcttatcgatggccggctatgtgacgattctttccagcgaaagacaggttacgtgcagcaacaggatctgcatttagagactagcactgttcgtgaagctctggttttcagcgctctcctacgccagcctgtcaccattcctcgccaggaaaggatggcatacgtcgaagagatcattcagatgctcggtatggaagaatacgcagatgccgtggtcggtgttgtcggcgagggcctcaatgtggagcagcgtaagcggttgactatcggtgtagagctagcagccaagccagatttgctgctattctttgatgaaccgacctcgggtctagatagccaaactgcttggtcaatctgtactctgatgcgtaatttggccgaccacgggcaggctgtactgtgtaccattcaccaaccttcggcaatgctgatgcagcagttcgaccgtctattgtttctcgcgaaaggaggacgtactgtgtactttggcgaccttggcccgaatatggaaacattgatcaaatatttcgaagacaaagggtcgcttaagtgtccacgaaatgcaaacccggccgaatggatgctcgaggtcatcggtgctgctccaggttctcatgcggatagagattgggccgagcaatggacgaacagtgccgagcgtgcagaggttcacagagagttggctgaaatgaaaaaggaattgtccaagcagcctgtaccccttcgcattgcagggtacggggaatttgccatgccactctggtatcagttcctcatctgtactcaacgcatgttccagcagtactggcgatctccgtcgtacctatacgccaaagttctcacatgcactgtcccggtaagttatactcctccattttatttgattggactaacaggtatagccactgttccttggattcaccttctggcatatgcctaccagcctacaagggctgcagaatcagatgtttgcaatctttatgcttctcgtcatcttcccgggtctggtccagcagatgatgccgtcctttgtcacgcagcgttctttgtatgaggtacgcgagcgaccttcaaaggcctactcatggatggcatttatgatgggcagtatcctcacggagctggtatggaatatcctaatgtcggtgccaatctttttcagctggtactacccaatcggattttatcacaatgcagagcccacgaatgcagtcatcgaacgaggcggcatcatgtacctgctcattctgcagttcatgatgttcacgtcgacattcagttctatgatgattgctggaattgaagagcccgataccggcagcaacattgctcagttcatgttctcgctttgcttgatcttcaacgggtaggctatctgcgggtatttggtaattaattggtaatagttctgactggatttctagggtactcgcgaaatcttctgatatgcctcgtttctggatcttcatgaaccgggtgtctccattcacgtacttcgtgtcgtcggtactctccacaggcctgacggggacttcagttgaatgttctagtattgagtggctcactatctcgcctccagatggacagacttgcggccattatctggacccttacatcaaggctatgcatggcacattacgcaatcctggggcgtcgaaggattgccagatctgcccaatgtcgagcacagaccagttcctcgaaagcctcaacatgccgtactcggatgttgggcgcaacatcggtttgctgtttgtctacgtggggttcaatattgtcgccgcgctcttcctgtattgggtcttccgcgtccccaagcattggtcgcgcaaggccaaggagacctaagaaggttgtcttctttcttcttcgggttgtggggggtggttatggatgtcggttctattcccgagtttctactcggcgttcatattctcttactctgttgctcctgtcacagagccttatcttgtcgaatgtatctcatacatgtagcttatgttaatgaattctgtattattttgtaactttttgcgcacgagtatccatcattgggacatttctgtgggcagagatgccatttggtacttgtcaataggaaagcagggcaatgggagatgggcgagaatagcattgtcaatccttttacaattctctacatcacaaagtcttcgtcgtttgatgacttgtttcttcagcgaataaatcccctcttccatcttctcctgtcatacgcgtgacttgtcgagcttctctgacacgaaaaggcctaaggcattgcctttgcgttctttcttggctttgccctttcttgactttgattaatcaggggtcaggttcgtgttctgggtaatttgctccgacttctttcgcacactagcgtcgtattgtttatgcgcataagtacacatgttcaaggtctcactcttctcttgtcagggatatctcatggttgtcttgtgagacaagcttcttctatgatactgagtcagaatgcaagcctcggttaatctgtccctggtgaacttaccgagtgcgtccaaggttctgtctatcatgtaacatccatgcgacaacataggcaatttcctgccacagaaactcgggacgagcatcacgatctcgaatcatcggtctgacttcagtaacggcgaacgtttcttgggaggcgtcggtctcaagagatcatggtattttgatcttggatttcctgaaagtctgtttgttagccagcttaatcaccatcagctagtccagtctcgctagtgtgaaatgacctcttacccataatggacttcttctagtccatacttgtggatttctctcttgtacacggcaaaggggagtgatgagaggttgtgaagtagaagaaaggtcaggggtgagaaaggttgagaagtgaaagcaatgaagaggagtgtggggatcgaatcaactcaattcagtacttcaagttcgtatagctcttttatgaaatgctgaagcccctggccgtccacgcaatatatatctccagcaaaagtcaagatacaccctaataccaatcaagcaatgcgacttggccattcagttaataaaatcctctttcatatgtactggaattgaataaccaaatatctctaaaagatctataaaataaatcgaaagcgacgattgggttggccggtccccgcttatcgacgcggaatcaacagtcttctcctcctatccccgcgaactccatgccaacacctacttttggtcctctgtacaacctcagtcatagtcatacagctcacacaattcgccggaatacctcgagagataccaatagcgccctccgccccttgcttctccggccgcgctgtccgtaccagcgactcaactcaccatgtacgctccatctgctcagtgaatcgctcagcaactaacatgccttctaaccccaggggcgtcttctccctgatcattatcaacaaagccgggggcctcatctaccagcgcgagtttcaatctggtttgcgcaacctctcgacaaatgactacctcgtcctagctggaacctttcacgggtaattcaataccatctctctcctggaatacccattgactttgattctatagcgttcacgcgatcacccgctccatcacaccgaaaattcccatcgcccaacctgctccctctacaacctcaacgggcaccgccgctcctgctgcgtccggttactcctacccaaaccccggtgtaccagtctccggcttggattacctcgagaccgacaagtttcgattgacatgtttccagaccttgacggggacgaagttcttgttgttcacggatccgttgacgggcggcgtggacgcaatcattcagaggatctatgagctctatgccgactatgtgatgaagaatccattctatcagattgagatgccggtgcgatgcgaggcattcgatcggcatctgggcgcatggttgagggggaggacatagccccgacgcgccacgcggatatcatgactttacgaactagatacgttttgttcttgtacttgtgtccggatatcactccgtctcgtataataccaaatcacataatatattgcccttgcacactgtagaacgtacccgcagaaggtcgattctcgagaatacaagacaaaaacagaagcaaacgccgggtatgcataacagtcatattcaaatcttcgatcggaccttacgcggtgtccatcttgtcctcgtccttcttatctttgtcaccgctggattcgccatggccctcttcggggatgttgcccagttgcgtcttgccttcctgttcttcccggtcgcgcttctccttctcctgtcggttcttctcgtcctccatcgataagcgcagagcaaatgcgagctcggggtcgttctcggcggcgtcatcaaatccaaatccacccgcctcaccctcgccgccgcctccaccgacgtcggcatcctcgccagccaggatcggagtctgttgcagctgatcgctgagaagatggggtcccggtgggatgatagcaaggtaggaaccatcaccactcttgacattgtcaacgagagcctcgagcttcttggtctgatcggattccaaatctccgaaagctatcacgtcgatcgacacgttgttcttcttcatcttctttgcgagcttcactagagtcttttcatcttcttcgatgggcgagcaggagaatacgatgatgcgttgacgctgggatttttccatacggtgcttgagtgccagctggaatgccatcgaagttagttattgagagctggggacctcggagattggctggaagaacgtaccgctgcaacctggatggtcgagctgagatgagctgtgccgtggatttttgtttggtgcaaaccagcgaggattgcgccaaactcagatgtgaaggttgacaacacctcggggcccttgccgcccatgctcataagaccgacagctgactgggggtttacacgcatctttgcattgtggatgatgctaacggcatcgacttgagattgccaccgggttgatctgtgacagttagatctcatccgcagatgcaaatatggtatgatcggatgtactcacgtgtagtctccattgcgactgctttcgctgttgtcgacactgtagcttggagttagcagagtaagctaatctggaggatgtgcaatgacggacatgatcatagtagcttccagcgtcatgatggcggaatttaaggaaattaacgatgtaaagaagggcagaacagagagtgaataggagatcggcgtatgagagacgaagacggatgacgaaggcgaggtggaagctctgcattctgccactgctccccgcccgaggcacctgtttgttgtggtcttcctggctccgcacttgtacttcgacacatcccaagtctatattccttgaaatttacccaatgtctgctattaaacgaaagtctgacgctatggacgtcacgcctacgggcagtccttctaaaaagatgcgcttaacgcagcttcagaagcaggccctgatggacaatctacagcttgaaagtgggtttaattgtgggtttgcgcggtgaacacagcactaatcttgctacagtaactgagcgggcacgtaagcttcgtgcccaatatgccctgcaggcaaatgacctccgggcgcgtattgagcgacgcgtcaatcggatcccggtctcgctacgcaaggcaaacatcggtgagctgctcgaaaagcacaatgcagcctcaagcaaacaacgggttgcgtcgccttctcggaaacactcgcccatgaaggtgtcgcgtattataccaagtatctccgtagaccaagaaacttctaccacacgcgatggtagagctcggaggggaaggtacgatataccacaagcccaatttggttttcttactgacagaatgaacagccacgatggtcacttctctgacaaagagaatgcccccgccggttgcgagtctgaactcaagaatcctaagcgtcgcgtgaagccagccggaccaggcggggcctcacgcgtggcatcccaggaactacgaggcaacgagaaccggatcttgtctcccaagtccaataattcccgcacataccctcactcgcccttccgtgcatctcccgagaagggtcaaccctcgtatcttgcacgccctacctcaccgctaaaaccgaccagtccgttgcgatcacgcggcgccactgtctctgcggggaaggaccagcggcctccttcgcaggcccagaagactgccccccgtgccgctacaggacccaaacctgctcggtcacctttgtcgcgcccggcgacccgacaggccgagcgcaagaacagcacagggtccaatgtgtcttcgggtacaacagtaatcaagtccacacggactggtactggcccgagaaaggcaaccacaacatctgccgcggctgccaaaaagccgactgcccgtgggcaggcggtatcaatggctgtcaagaatccctctgcgactgcttcaatgcgcaagactaccgctccggctgtggctgaaactatgccccgaactcgagcgctacgcaagcggatttaggacgcacagacatttgtcttcttgttttggagttggttgggattatgtacctttgagcgtgggtgattacagactgcaatgaacaatatgagcctggatgctgtctttcctgttgattctttggcgcgatatcataatcggagttttccttttcgaatcttctatattcatagcttttgtccgggtatctcacccagcttattttcgacccaatactttgccgtcatagccatctatctgtgtgtatccgtctgaaaatttcaaacagacctgggcaaatacgagacccctgtcgcttgcctaccaatcaatgatattgctttttccatcacaccgctctcccggtgagttcattccagctcctgcccagctaccacaactcgggcttcacataccgcgagcaccaatctccgtgttttcataatggagatcatccgagagtctacgtccttcgaaacccttgacggcagagtcatgtattgctgcaagaattttgtcgtgcgacaagatggtatcctatactacgggtcgtggaacgatcgatcatcgaaacctaccgatatcagtcagttcaatgatttgaggacgatcaccaccaacgatcgaggcccgaaaatgcaggacacatgggctgtggcatccgaggaagactgttacctgaaaacgccaggcgtcgtcgatttcctctattcaaagctggaggacgatattcaatgcgagcttaaagtgtgtgaagtgcttcgcagacatccacacccgaatattgctacttattacggctgtcgtgaggagaatggtcgggctactggtctttgcttcaaacgatacaaggaatccttgacggagaaagtcaatcctggatacctgaacaagaacatgttccgggctagtggtcgtgagcaagtcgatgattctctcagagagaatttccatgggattttggagggaatcaagcaccttcattctcttgggcttgtgcataatgatatcaatccgttcaatatcatgcttgatgagcatggtgtcccggtcatcattgattttgggagttgtcggaagacaggggaatcattgaataacagcagagtgggacagacagacggatggcatgattcaaaaaataagcttgtcttggaaaagaatgatttggatgcctttgaagagttgaagacctggctgtttggttctgtggatgatgaatatctgttccacgaggagtatcaatttgaggaatgctagacggagcttagaattgcttacagtacccgctctgattttaccatggctttactatcgaagtagaaagcaataactatactgtccagtgatcagaggttcagacttcagacttcagacgttatacccaagaaggcatcagcgaagtgcggtataggtgtattcagatatttaatctaccatacaagatgtacaagcaacatttaaaagatgcactagcgaatagacttaggtaggctcggatagtggtggtttgaattcaaagtgattcaaggttgatttattaggacttcacgaacatgcaaggttttacataagtatctctcttaggcaattacacagcacagttatcgtagcaatcatgttgattgaacaaataagaaaggaaataaaagctcccttggctccggttaagcaaaagacccgggagagaagaatcagaaaagaagaaaggaaaaacagggtctaggtatagccgtagcctggcccacgaaaaaaaggagcatgctcagaaatcaaagcgagagagaatggaaaaactggacattgatgcccaaagggacaggtatgggtatggctgatccctcgaatcagatgcaaatgaacaaaggtaaaaaaaaagagacaaagtattccagccactatagaaatagggggaagacaaacagaaaccaatcaatagcgaccaagcagcttgttgatcacttttggggaattttcatggaaaaagaaaagggaaaactccgtcaaccagtcctatcactggacaaaaaagaaaagtaaaaagaacgctaagaaggtcccaagaaacaagaagcgagaaacgagaaatgagaaagataaagaaaatccactggattgaatcagctggatgcaagtcagagtcggatgatgatgtatcacagtattgcagctgtgcaggaagtgtaaggagatccagtctacccagtaacacccatggcacccgcattcgggcgcggcctataagccacattggatggttgaccatcaggtgcccctgcgattggctggcttccgttgctggtgctacggtcacggcgatacgctgctgggggaggaggaccgaaatcaagtccggcctggatgttagtgctggacgagtgtgcgtgtccgctgggcccgaccacatggcgaaccgagctttgcatctgccaagctgcatcctgagatggatcagtctcaatacgcgcggaagctggagtgctattgtttcggttgggggtggtgatggtgaatgtctcgccaccgttctccggtcgctgtgcaaagctgcctcgaccgatgtcgccatatcttttaaggatttccttggttgtcacttcggcattctccctaaagagagttggatcacccaagaccgattgtaggtcttctggaatctatgaacagagtcagcacaatcctagcaaaagctcaacctgggcgatttacttcgcagaatgcatcgttgtacgtgatcagggcattaacagcctcgatggccaagaagctctcctccactgtgctgtttttgacattggggtagaggatattgggcgtgatcacagtcgcaagattatggacgtccatcttgcttccagactcttcatccacatgtgagaaggatgaagtccagtttaagaaggcaaacaggacttccatcgtatcacgatgggccttgggaagcagacagcatgtcaagtgaagtagtcgcctctgtttctctgtgtcatccatttctgcgatacagttagcattgcacttgtagaccgataatcctaacatcaaaacttactttgtgagatgacaaacagtctatgcagcttgaaagtcaagagaggatcgggcatttcacggaggaacttcttcaaaagagctgcaatctgcacgggagtttcctttgtcagatcaacttgctcgtacttggtgtcaattagctctgcggtgtccttcaatcggcggatgtttccgttctttcggaagacaccctccacagacatgtccatctgccgcatagcgcagacagaatcatcaactagcgtcgggatgcggagcgcaccaggaccaacaccgtgacttgactctgtgccctccttctcgaccagatagtctagactgacaccaaagacacccttcttcttattacccttcttgttatccttgaaggcacggccaaagatgttccatatggtaggcttgcgcgactcgataagggaaaggagctcttccatggtgaaatagccctcgactaacggttccatttggagtacagcaacgtggcgaacgatgaaatattccaaagcagttagttctgagaagtaccgcttggttcgggttggctccatcatcgcttccatatttccacacgatactccccgctggtgaccctggttatatctgggcatctcggtccccccaatgagttttgtaccagcatgcctgtaggcattaggtcgctgctccttggcttgctcggccgcaacaatgcgggggatgtcatctagcgtcaaagcatcctgagccccgaaagtcagatcagtaacaggttcgccattggcatcccgttcttcgacaatctggaaaccgtggctcctcgggtcaccgccatcattgccagatgaccctggtcgagcacttctgccttctggtccatcaatgattctggatgcgcgggctcgtttgtacgttgtggatagggttcgctcatttcgaatagagcgcagccgacgcatctcgccaacggtctgctcgagcgatgtttcttcgaggccatctcgcgaggaaccgccatatgactgggagcgtgtgttcgcccggcgaacctgggaagtgactcgatagccgtcattgttgtcgtaatcattaaggttggggtcgtctgggacgaatcaagttagacagactgccggcggcatgggggtaatgtaagagtatcctacctgaggtatgaggcaaggttcccccggatcgcagtacggcgagaagccgtgcgagtgccactttcagcaagaaaacgaattgctgcaattttgagactggagtgaaaccacccttcacggtggggccaagtttcatctggcgggcgcaagcgccgcagtagactttttcctcgctgccgctccacaatgcgtcttggaaatcagcggttaagtccttctcacatgatttgcatgaaagatgaggcggcttgatgtgccaacgactctgtcccaactgaacacattcgtcgtcaattggttctttacaggcaatgcaacaatctgaaagttgatcggccaagccttccactccagccatcaggtcgactggcgtatcgtcatcctcgtctgctaatgactccagatcacggagacgctctaggaagttttgtaaaccatctggcgcagacttctcgcgttcaagtttcagtgcaccttgtagaccgatgcggataaggagtttgaggtaatgagcgagaccagtcaccagagacaggagttcctgggtgacgccaagtttgcgtaccccagtttcctgggttttcgatagaagggcgaagaaagcgacaatctttttgcaaagaagtttggcttcgcggccataggaaagttctggttttgaatgatcagcgatcgccccggatgatataaaaccagccgcgcgggacttaccttttaactcgtgggatttgatgtagtctgccaactgatcgactgcaccgaagaggatttccacatgttcgatgaagcgctttgctacgagaacaccatcgatgtaagcgccgttactcacatgaagtagcatgtctgagatgcaagcggcggatgattcttcaaaggtagaaagggtgttccaaatattgaagaccttttcttccattaaatcttcttcgtcgcgaatatgcttgcgctcatcttcgctggcatcctcatccacgggcggaggctcccatgtttgaccggcaggggataaccggacattccagaacttgtgaatcatataacattcggggtgccaatgttgattttgaccgttgcggaagatttcgacaaactgtttcaggattgctgtgtgacatccatggcaccgctgggcaaactgtgttgagtagtgaaagtggcagtagaccttgctctcgtgttcatagtaagagtcctgcgcaccaaagacggtcgggcaaacggaacaggtgaagtgttcaatatgatacttccggtccaacgctgtaatgtatgatccgcgtagtgcgccgccgcactcatggcataggagacccagtcgtctaaagtaatcggtttcacaaagcggaaactggcagcttgaatcttctgaatcgacggggaaaaacttcgaagcaacgatctcgccacagtcctgagaggagtatggaagttagagaagaccccaaaaacgcgggctagaaaaaacaacttacttcgcacttgaaacactctagatgaaaagttccccctaatgctcgaacaaactggccagtgagagtttcgccgcacttttgacacagtcgcgatgaaccacctggagacttgttctgacgcccgtttactcgcgagcgatctcggggcgcggagcggtcgcggaagccggcctggtcaggacccagaccacgacccgagcggccaccatcctcctggttcgccggactgatggggcttgggcctgccgttcgtgttgacggtgactcgaatggaatcaaactatcttcgggagatgtgggtgtgtttttcgtatagctagccccgtagccagaggtgtcgacggtgggacggccgctgggattacctgcgaccaggctggctgggagtccaccggggggcatcttggtcccccgtcaggagaaatacggtggggtttgttgggttgaatcacgccgaacgctgcatgcaaatattggagagtaaggaacgggcgaggtgacgtggtaaacgggagttacggtaggtttgtatcgaagatgcaacgcggttacagattggcggcaaattgaaggtcagctgggcgcgtacggtcgagagtctgattcttaaattagaatctcatgccttggggtcactgttgttccccagagtgtactcaccctcatgccatgtaaagacacgcgggggtggctgatggaggagggacggaaataacgcgcgcgcaaagccagaggaatcgaattgaggaggtggtatagaggaatgttgtcgtgaacgaagggactgaaagcgcgcgggctagaggacgcggggaccggtcttcgagggggattgggagctttcaaggtgagaccaacagagggtgctgattatcgggccacagtcatcccaaactgaaccgacagcagattccaggactccaagaacaagatagaaaaaattaaggtgcaagggcgaggggaaaagaagtgggctggggaggaatggagatggagatgccccccccctcccctaattagttagggaccctgggtcacgtggtctatacaattcccatgtggacggtcaacttgggggagtgggtgacatattctagggtcttttagacatgattgcaggatatccaaggtcaaatctgattgaattgatctgagcacatggcaaacatcaacattgcactgtgtactatgtgcatgtagacacagcttcttgtgtactccataccgccccctatgccatcactgtgctttttatagaacactctgcagattagtgtttggtttttgtattttaatttcagaagtgacatggtagtttgtatggatatgtatgtcttttcccctaacatagcatcaaaggtggaatataggggtattttggattgacccttgactatgtcagatagtctccaggttggatatctcctaaggatgaaggatacacgaatacttaggtatctccatacatagtactccgtattacatgttagtttcttacatttcaaagtttccagggagatccatggaaaagtaatctcatcagactgatcagtacatttggattggtcgaagtatgttgatgttgatgggattacccgtacagtggagagtaggaggctggtagacaaaaaaacagacagaaatagaaaaggacagaaaatagaagatcgtgaagatcaggaaaagtaaaacacgaaagaaagagaaacgtagaaaagaccagaatacaaacaaaccaaaaacacgttaagggacaaactgtctagtcgccttgattccacctgactttaccttctctacctcctcttcatcctcctctagaccatccacaccattcgtgcttttaatacatctaggtttctattttctaagttgctgatcataactctgcgaccttcacgatacacccgtgaacacctgaccaactcacctcagacgttgcaagatgggtgaccagtgcactctgcgcctcgtccgagtacgtgcctttccaactatgattcatttgggcaaattaacccgataaaaacactaatctcacattgtcgccttaggagttgagacaggtcgagcaaagtgaacaactgggtatgagatctcttagcacttcaagccattccgtatggagacccacagactgacctcgatacagccttcactatctactacgaagaaagcaacattcgggatatccaggccctcatcatcggacccccgggcaccccatacgaactgggcttttacgaggtgagatccacccagctattcaaggcgggcccgggcacgcttgttgaactatgactaaccaattgtaatcgtctgccagttctcgatcaggatcccatcaggtaagatgatcttgtctttcatggcaggtccttgctaaatcatatggtaatagattacccagcaaatcccccggtggtgaaaatccggacgaccaacaggggccgaactcgctttggacctaatctgtatgctaatgggaaggtctgcttgtaagtgtacccggatacttcttttatacaacgcctgatactaacattttctaggtcgatcttggggtaagcttgtctaacaatagagggtttttatggagcatcgctaaacatcgcaacagaacttggcatggttcccgaggtgagcaatggtcgcctgcacagggactcgagtccgttctgctgtcaatccagagcctgttatcatcaaacccgtatacgctggaaccgggatttgacgacaacgaacgggcgaacgacacggaaaatatggagatctacaagtccaaggtaaagatcgctatcttgtcagaataaactggacaatgctcacatttatatcagattcgtcatgagaatctacgactagcagtcattacaccggttgaacaagccttccaaactgcgacgcctccccgccgaacggcgccaagggttggttgggagtctagcacggaagaagatagtgatcacgaactccaactcgatctagacggattccccattcaaagcaagtttggcgacttttgcaagcgacggttcctatggtacttcgagttctaccagaacgctattgagaaaggtatcgcggacgaggcacgcagacaaggaacgcccttcatccaaatgccgtttgaaggctatggcaattccatgggcggagaatggaactacatcgccctacaagcccgtttgttggctgtccgagaccaggtaatggaagagacaaaccgctgggccatcgagggtcttactctggtcaaggaggatgctgggattgccgttaaacttcggggtcggcatgaacagattgctgcagaaatgaacagttctcctcaagttatcgatctgtcactggttgatgataacccgttcgtctggagactcacctatgttggtcgcaacgagtccaagttggaaggtggcatcatcaagatcaagattcacatctctccccgacacccagaagaacagcctcgggtctttatcgagccgcccctgtaccacatttgtgtctccaaaatgggtgtgttgatgtatcttccttcgcatgctgaagagatcggccaacatatcgacggcatcatcaatacactggaagaagacaaccccccgtacaatcccctcatgacagtgaacccagaggcaaccgctctgtgctggggttcggaactagagcgcaggctttacagacgcaagcttcgagcatcactagaggattcctgagctgagctagctcactgctggtgcatgtttgctaagcaatatgtcatgcaacatgacagtattcggttatcgtcaccaactctccctcgcttgaactgtatcattttcctgccatcactatgtcttgccactgtgccttaccttacttgagatattctttatgatggcggggagactaggaattggcgcgtggcgtaccatttaacacagaaaaatcgatatcaaatagtattcataggtacacaaaaaggaccttgatgacgtcttgtgatcaagtgtaattaccgtctactaagtagatatagtagacggatgagacaacaagaaaggctctgtggctagtagagatggacggaccaccatcttttgactgtaatcatatagtttgtgtaaggctcggggcagttggaaaagtatgggtactccaagaatatcccaagaagagaatcaactttccaaggtcagctaaagtgggatagttataccaggaaccttgttcacggcacgatagtaatcacgaatcatacaatgcccatagacgacacaagacctcgggaggaacagataccaaggaattacgatgccacaggtcaatccaatgatcacaaatcctttgaatgtgtcggcgttgcgggcgatgtttcagtctccgccacttggaaagtgtgcgcacatttgcccgaatgttgaacatatcaatcatgtcagtcgaaagcattgctaatcccttccgtacttggcattcatcccaggacacacagcataatggtctctgaagacccttttccaacgccgaaatttcttgcggtcatcccaaatctcggcgatggccctgatatcagccatgatgttcgccccttgaggcatataagtttgtgacgagaaggccggcgtggtctgagcttttgtttgaggctttgggggttatagtgaaggaatcatttctcgaggactggcatttttgttgtcaggccatcaagcctgagggtttcaagctgtgctgccaaagcatcaagccgtttattggcggtcgacaccagagtatccctagtaggaaccgtttcggccaccctgtagacctttggcgaggtgagagcgccgatgttgtctggagtgccatcccttgtagatttttgatgtcataagttctccatgatgaaggcgtcgcgatgcaacattggagtcatctgaatatgagtagaaaacattgaagtcaaagcaggggcaaaggaaaagtcaaaagggaaggtccgttccttctttgtatatatttgaagtcaaccagcggtgcattcatggatagggtccatgacacatccagagacagcgaattccattcacttaaagtagttctcggcatgatatattatcaacgaagcaatgttcaatactacttccattgaatataaagtagaaaaggtggaagaagtagaagagtgccaagtttaaggcatagcccgcacggatcacctgattatctccgccaacttccccggccccttttcagtcaactcccatcccccatctccctacagaaaaatcatatcatgtcggcaaaaaggcgcacgttagagctaggcaatgtcctcgtggtcggaggctgtggctttctggggtggcatattgtcgatcacctgctgaatttcccctccgagaccgaccccagttacgctctgccgaagcccgttggcgatgcgcgcttcgagtacccgactctgaaatcgcgctacccggattacaactccacggtctctgtcgttgatttgcgcaccaccaacaaccgtcttcccggcgctcagtactatgacggcgatatcacttccgtcgagtccatgttggaggttttccgcgctgtcaagcccgatcttgtcattcacactgcctcgccatctatgattgagggcaacaagcccctgctgcacaaggtcaatgtggacggaacacggacgctacttgaggtcgccggtggcgaacatggtgattggggtggtaaatgcaaggcgttcgtctacaccagctccagctccgtggtccacgacacacagagtgatctgaagaatgtgaatgaggaatggccctacatccggggtcctgcgcagaaggagtactactccgagactaaggtgagtttttatcatttttaaacagatcttaatcgggatcaatcactaatcagaccccttgtctttcaaggccgatgccgaggaaatcgtcctgaagtacaacaagaagtccccgaatgagatgctgacagcggctatccgtccggccggaatccacggagagaaggatacaacagtcacacacaagatcctggagcacggatcccaagcatcggatagagtgttacggctgcagctcggtgataacaacaacctgtttgatttcacctacgtcggcaacgtggcttatggtcacctgcttgctgcgcaccgccttctcgcgagctatgaccttctcgcagctggcaagggcgggccccttgactacgagcgcgtagacggcgaggctttcaacatcaccaacgattcccctgtatatttctgggatgtcactcgtgccatgtgggctctgatcaaccgtgtcgttgagccggaccaggtctgggctctgcccgaaggcctccttgagattgttggtggcgtcgccgagactgtcatgggattgtttggcaagaccccgcgtctcactgcccggacagtgcgatactcatgcatgactcgctactactcgactgagaaggccaagcaccgcctggcttacttgcctgttgtgcccttggatgagggaattgcccgtgctgttggatacattgttgcccagaaacaagcggacgcaggaaagaaggcattgtaattgaaattagatcatgagattgaaaaaggcatcttatgctgtattaatatgattaattacatttacgcggttcatgtgaccatattaccttaataggaaagtgggccacccatggtttgttatatcagagttgtggatgtgttagtcacgtggaagtgatacaacctcgacgagacacttctcaacaagcagcctatctcctgcaactcattaggcctcaagcctcaatttgccatcacaatgtcccattttgagaagcagtgttctagaatcgattacgtcaacgaaactgggacattgtaatgcccggcatgcctgaagctgggtatcatgcttcattagactcgccatcagagtccatgtcgcttttgctcacaatattctacgttgtagccgactgaacaaccacatgtagagcgggatcgatattctcaggcctctaggcaaacaaacgttcgtcattgtacaaacaaccgaagaagatgttgagggccaggtgcaagtccttggtccagcattggagcctagaggcattcaaatgtaattaccacacaatatcatcgctggaacgacatagtatggttgcaggtatcccgggtcattctctcggatccagtataagaaccagacttgacaatctcaccaacgcggcatccggggtactccatacatacggagtacgtatctgactatatattagaataaacgtggcaattcttatttgtgtggcgtcctcttggcctgttcgcacttggcacttggctcttggacctttggactctctatcctgtgataggcgtgctatggcgtatccgacactacaggttgcgtgctgcatgtgagctggaatatgaatctgataatcaacccttgcatagcttcaatccaaaagcctcgagatacgcctcaacttatttttcttcgaggtttctcttgccgccttcctcagggtctttgtggtctgtgtgtactacgtcgtacatcatggggttaacaggaaccaggctcggagccttccgagcgtatttctttggatacttcatctgtaccgcaggtttcttgtttggctatgacactggaatcgttggcaagtaaagcagaaagcacatgtggttgattcatcgctaacagttttgatggataggtggtatcctcgaattcaagtcctacatcagtgatttcggctatacggaccaaaccaccgtcagcgctgtgatggtaagcttgcaaaatgtaggcgcattcctgtcggccctgggtatattctgggtgtccgaacggtacgggcgaaagaaaacagtccaggcagccatggccgtgttctgtatcggtgtggttttgcaagtggtaccttcacactcactcgtttgtttctatatcggccgatttgtcgctggtctcggtctcggtgcaggcactgcggtcgtcccagcatacaacgccgaaatggcacccaaggaaattcgaggcaagctcggctcgggaatgcaatggttcttcgcactcggtgtgatgctgagctactggattgattacgctgtgaagctcacactgcccgtctcttcgaagcagtggcagattcccgttggtctccagatggtgccagctggagttcttgcactgggtctgtgtggtatgcccgaaagtgtgcgttggctggtcaaaaagggccgttatgatcaagcatgggaaagtctgaaatggatgcgagctagtgaaggtggtgacatgccctgcagagcgatcacgggacataggactaatcagctctcaataggctctgaagtgaaggcagagttcaacgaaatccgagtcggtcttgaggaagagttgcgagcaaccgagggcttcgataagcgcgaacttctcgagcccgcaaaccgctacagactgctcctcgccgttttcatgttttgtggtcagcaatgcactggtatgaccgcgctggcttacttcggcccgcagttcttcaaactgatagtcggtaacaacaccaaccagtcccttctcatcactggtcttttcggtgccgagaagttcattactgttggcatctatatcttattcttctccgagatgtggggacgcaagccgaccctttggatttcagctctattgatggccatttgctttattattgttacagtcgtcaaggaaacaacgccagagcccgatgcaaaagctaccccggctggtattgggatggtggctatgatcttcctgaccaactcgatctaccaattcagttgggggccattaccatggccatacaccgccgaggtaagtaatactatgctcgtctatgaccagctcagccactaataagcatgtagatcttcccaacacgaattcgggggattggaacctcggtcgctgtatcaacacagtggcttttcaactttcttttctcgctcgtgacgcgctacatgatgaattcgtggggcagttatgtgttccttttctatgcgatcctggatatcatcatggcaatcattgtcttcttctttgtcaaagagacgaaagggaaaagccttgaagagatggaaacaatcttccacagcaaggctgcatttgacgttgatgccatccgacgcgaaacgcttgatgcggaggaagttaatgttaatgtacagaacaaatccgtaggcctccctttagggtaacgaaaatagctagttagaagatgcgaaaagtctaaacatgacatttaggcagatacccttggattgaccaatcagagaccctggaatcgctgtaggaaaaaggggcggattcgagaaaaacttgccacttgcacttttccttctcttttatctcttcttaaattgtgaacaggcaaagcgtggatagttctgaacttttaaattgctgatcgattggaaaaggatgggtgagtggacagctatgttacccggcaaagcaggcgaatctatgactgacagtggtgtgtaggttattatgaggtacagtcttttgccttgctcaatagacagcatatctgaccgtttacaagtttcgctgccatttatgtggcgtgagcttcaatgtcttctttcgcctaaggtccggggagctggacttgtctgatcctcaagacggccgattctttgagccagacccgcttgattcaaaggtttatgatgacatggttgaagaccttgactatcaacccccaaaagatattggtgacaatgatccatatgaatatgattccgattacgaatcgaccgatagcatgagccttgacggagaagatgcgcgtgacaatggagatagcgaagacagcagtactgatacaaatcaagaccccgaaaggaaaatgtatgaccactgggtatggcaaactttcaagcggcctggccttacagatgatttgcttcgcgttggattccttgataacccaacgggcggctattcggtggatgctatctcacctgaacaggcgagcggctgtcgcaccgcccagttcctggtgcataactcactccagagggatacatggaagtctgatgaactacatgagccatgggagatcgatggggattggtctttatccgggatttgtgatggagcgccgatggacccaatagtgtttcccaagcgaaatgggttggaatatttcgaggcagatgatacgttcatttctgtaggtatctatcaagcgcttgttgcactgaaccgcctcaggggcccaacccaaagctgacactggtggaaagcagaacataccaccgaatgaaatagccatgccattccatccgtggtgctttgatatcttctgccgacaatccaaagtccagtttcaatgcatcaatgcgtcagggctgatgacctggcgtaattctgagtttgactatgattcacgtgactcatttcctcgatgcaaagaggttaaaagttcacagaagcagtggtggtttcatcagcctggtaccgagtatctgattgcaaacccccttgacgtgcctggactaccagaaatacttctggctgcggtcgagaaccaagaatccgatgcctcttatgacccatcgtatgagattgaatcgtctcaatccccgacgaaacgccctgtaccatctcacaatagtcaagccgacttcctctctgtccttccggccgaaatccggctcatgattatcgactatttagactctagtgacattgctagtctaaccgttgcttccaaggcattcactgaactcccaaatactgtgtggtatagactagtacgccgagaaatgccctggttatgggaagcctgggatgaatccgaatgcatacacagcccttcgatgtggacaaatatgcaaacagccgagctcaagtctatgatcagattacgaaaattttatgttgagggcttgctggtggattggtacacagagcgtgacgccgagaaagctgctgaacaccgatatcctatgacagtgaccatgccggaccaggtgaaattacctataaggaacaccgactggcgtcgtgttctattgcaaattcaacgcaattgggacatgcttaaggggttgcagaatcgacagcggatctggaccgatgtggaggagattataaggcggattcgcaagttggacgcatagtacaccggtgattttgttcagttagcctgcaatgtagtgaacttgggttttgcaacagtacaatatacgcactttcgacgcttatgcttgtaaatctggcgaaatagattggcagtcatacccaaataggaaggccagccagctcttggcgtcccccgcagcggcgaattgtcggctaatcaccccgcgacggaggtgacggtgaccgcatatatctcatctcgtgttactcctgcacgattagtatcaaaatccaatattttataaatggctgcctctgagaaacgccctgagatcatcgagcttgctcggggactggcaagagtgcccttgtgcgaggactatgagtgtatgatatctgggatgatgtgtgtatcatttaaatccttacactttgacgggacagactgttgacctgtctaggtacaaccccaacatcccgaaattgctagaggcgcggcatttatgtcggggacttgctgcagacttcaacaatctggacacaaagaccgtgacgtatgacaagatcggcgacaagcgtcttgagttattgcggaaacttgtcggcaaaattggagatggaacattcattgaaccaccatttttgccagactacggatgcaatacttcgatcggaaaggattgcttcttcaactggaagtgagtcttcatttccaacctatgtcttgttgaaacttgctaacaattcctagccttacgatactggacaccagtctagttgtcatcggtgaccgtgtacagattggcactggagttagtctcatcaccgctggccatgatactagcgttctttctcgccgtaaattcgtcgagtttggccatccgatctttatcgaagacgactgctggattggaagtaatgtgattgttctgcccggtgtgcgaatcggccagggctcaacaattggagccggatctgttgtcaccaaggatatcccgccgttctctgtcgccgttggcactccttgccgcgtgaagaagacaattcaatcggcggaagaagaggagcaggatcctaataatccgtaccgcagtttggttcgtgaggatcaatagaatttgatatagaatcaaatagaattaccggtagacgaggatcaccacccccgtctctgaacagcccacgtacaaatcccgtatcacttttctcaatgcgtatccctcatgtcctgaatagcgctggcgtgcaaccctggtattgtttctagctccaaagcacactgctacaatggctgcatcacctgcttttttaatcttcgacgagtaacgatccttggaagcgtcgtaactccacataaggttgggtgcatgcaacatggagctacccaacttgcggtccataaagtggacgctgtggtagcttactcgagatctaccaccattgctataatatgaagccccccgtcaagagattggcttatgtaaatgtctacaaggttcagaccagttataactttttttatatcagattaataaagaaaaatgaacgttatacatcttatccctcttgtaccttttgtatcggcgtggcatacaaagtatacgtgatgtgaagaagtatcatccggtgaaaaatcaggagcgcgccaacacctggaagtattgttgtgtgcccggcactatgaaccttgtactaacggtctacaaagagtaagacgtctaattcagttgtgtagagagcaattgaattgttgaggtgtttcctcatgctgactatgaaattctaacagagttgagaaccggtccatacctaaacgagatacctgaagcccttgcgcatacgtagcgactcgtctgggtgatcgatgatgtcattctcagtcgaatcccctctagcaccatcggcaagctcgccctcctcgagctggtggttcaagctgaccaacatcgagcggaaataccagcatccgccgactgtgacaccgaacatggccagcacaattccatagctggagcgatatccattatcttccaagtcccagacatatgaaccagcaacgttgcccaattgactgaaggcattgatcatagcaatggcgacggctcgcttggctggaggacgggggaatgaagaactgatccatgagtagaatacgatgaatcctgcgtaggaaccagcctgcaggaaaagcgcgacgtagcgagctgcggtgttgctggtggccatgcagatgatgaagccgacggctcccataccaatcgggccgatgatatgccagaccttttcttgtgttttgtccgcgtgccatgcattaatgacagagaagatacaggagaagacccagggaggcgcgctcatcaaaagagtcgggacatatccgaatccgagcgtaccagtgagggtaggctatgcagcaagtcagtaaaatatcccaactggttttttgatatgacaagacttacgaagaaagcattgaaagaaagtcccaccacataagccacaaaggtgaacatcattacatagattttggggtccacaagcgccattttcaggcctccaagagccccaagctcttcaccatcggtgtcagcctcgccgacatcctcgagcatgcgaagttgtgcaacctggcgctcttcctcggtgaagccacgcgcattatgtggcaggtcaggcaaaatgaaggcggcaaggatggcgaggaacatggtcactgagccttcaatccagaagagccagcgccacgcggcatggcccatgacaccttgcatgttggataggacaccagcaccaaccagtgcagagaatgcattggagatgaggttaccacagaacaggatggcgttccgggttgtgagttcccgacgggtgtaccacttggagaggataagcaaggcaccgggcaggaacgctgcctcaacgaaccccagcaggaaacggacagccaccatgtccccaaaggtcttagtgcttccagacaaggtggagataacgccccacaatatcatggcgacggaaatgtaaagcgagggccggctgatacggttgatgaacatgttggaaggcacttgcatgatgatgtagccgacataaaggatactcagacatgtagagtagtcagtattgctcagtttgagatcttcctgcagacccttgagacgagcagctcctagattgttcctgtcgaggtagttcatgactattgagcggcgtcagcgatgttgatttgatgtatatgccgcacggcggcgggttcaaacactacacaaggtggtacgcactgtagatggcgacaaaaagactgcacctagcatcaagcttccgcttgagcttcttctcgacgactatccggcgagctggatccatctgagccacgccatcttgctgtggtgaggcaatgtgttcgagattttcaacccgttccttctcggcctcaatctccatccggtcacggttttcccgtgagatatcgtccgccattgtgtgtgtgattgtgagcaaggccagagaatccggggaacagaaagagcagattcttgcatttaagcggaaagactcttctcatggttcatcccgcgctagtatttttccccggtacccccacgcctagatcgtatgtaaatcgtacgcgggggggatactacagtggagttgcggttgaccgactcggcatccgagagcaggagacgtcccgaggaggcatctgattggatatgactgaaggggaatatgagggggggaagtttcaccccgtgttctggtatcggcacgggaactttttagggtcacaaggtcacgggatcacggctctcggacttcactgtctctcacgggacgcgaggaaaacaccgaaaaccccacaaaagccagaagaaaccgggcaaacccgggagagaccggccaaaacaaaggagccaaaacaaatcttggaagtcagaaaagccgatatccacacggaatccgagttcggcatacggcgccaatcccttacaccttccccgcctctccgcagtttgttccctctcttttctctcaccgggatcatgaatgagatcatatccccgcaaagccatttaattcgagttcaatggaatgtggggaaagatatacacaacgtacgatgttgtatgttgaaacgggccatacggtctgaagtacagtatcgtggatgtgacccgggaaaaacttgacaaatagattctcgaccttctctccacttggtgagagtttccgctcaagcccatacggcatttgtccggtaccccacgctcggtctgccgatattttgccgcttcctcagttaagtgtctagtctagttgtttacattgggtagatggacaccggtggcttcggcctgctccgtcagctcaatttcctccacgcggtcatcctcatgccacccctctcggtcgtctttcactagtcggacaaagcacacgtcaagtataagtgctacggcactgatggcaacaccgaagaaaagtgccgctcgatatcccgtgatttggctacccgagcggcgggcaatttgaacctcaatggtagatgcaaagcctagtccgagactgtttccgtatagattcaatgtgccaatcaccgacccggcaattccctgctgatttcgacgcacggagttgctggcaatgatctgaccagccgtgtacacaaagtccgggcagaatgagaagaggaccacggaaggaaaaatctgcggccagtaagattgatggattggtacggtcgccatgagcacattggaaattaagatcgtgacggttccaatggccaggatccattgtgctgccattcgcgggatcatccatgctgcgagacaggcagcgcccgtggcgcagatcacgaagggggtccagcctacggcaaattgtaggggagaccagtgccagactttttgaagccacaacacttggtaccagatcaaggttcctacggccatataattgagaagcacgaccaatagcagcatgaggaaggatggagctttgaagatgtcgagtggcatgatcggctccgcggcatagttcctttcccaaagcaagaagcccccgaataggatgattgagctgatcaggagaacgatctcatagggggttgaccaaccgacactcggtgcttgactgtggaatgttaacatgcaatccttcgggttaatctcaacaacttacttccaaacaaagttgaacaagatcaacgagcttgttccaagagccgatccaatgcaatcgatctttccatgccgatcggctggtggttctcgcggactcaaagcccagagaggagtgaatgtggtaacaccgaggcaggcactgtgttaccaacgcatcagtacctacttatgatccgggttcacggggtctatcacctacatgaagatgaaaaaccacttccattctgtccgctgtagaaaggcacccaaaagcaaggccccaaaatatcctccgactggtgccgacgcaccaaagagaccgagactgagatttcgcacgcgaccggggggattggtgctagatatcatggccaccgcattaggcatgatgaacgcgcctccaagaccagctagagcccgcatcgtgacaaaggcgaagaagttgttacaaaaggcgctggctagagtgcagatagtgagccaggcacccccggctaggacgagttctcggtggccataaacatctcccaatcgcccactcaccaacacgaaggtaccttgggttagactgtatttatgttagtgagatggtgtaatcataaacatctagatactctgtgccttacgcatagctagcagcgatccacgaggcgtaggtgtcgtcaacgcccaatgattcactcaaggcgcttcctccagcaatgcctgcaaaattgactgtcatctgatattgtcagtattggaggattttctgctctgaagaaagttgacggctctgagtatacctgtacgagattagccagaacaagcaatgcagtaatgaccactcgacgcgatctggtcgtccgactgggcagtgcccgctcaaagacaagttggccatctctaggggtcagattgtcttctactgagacctgcgtgtctggaacatgttcagctggggtcgcgggggtcgggtcaagctcttgggccacagtagacgatgcaacaggcttgatgtcgtagtgaagagcatgtaagagcgacatggtttgataataaagggggtgtttcctattctttgtgactagaaatagactaaataagatctcgagtttaagtagacaccatcggagaccgggtccgagctactgagcagtagacgtaactgctttgactcattctcgatgagagtcaccattcaattgggtgtgcattcatccatgtctgcaactgtgattgatcagcatagcggtgctagatccgtgtgcggaaataatccctgatgtacacacattgtacttggagatggatttttgtatcaagagattgtcagacaagactatatcataagcagataccttgctttactttatatgggctggcaatagaagacatgaggtgcagtcgtttctgatagactactactaagttatccgattccttactgaagtcgctaaatatccttccacctcaatatccgccacagcaagcggggaaatttcacaagaaaaaggcttagggtcgatggtgaatgcgaatctcggcgtcatcttgtttcttagtccagcgctcatgataccagcggtatatccctagcctcgaaacactacaccagaataagaatgtggctatttgaattttgttttagtgtcgagcagccagaaatgatatgagccctatagatcaaatccttatacgatcggctgtcgcgcggggtaaatcaccgtccaagatgaactcgtaggaaatttatcctgtctctggaggaatcaactttcttggccatagtattcgaccttgtcgtagtagatgatgtctccataacccgctttgttagctaatatctgctaagcatactggtttgttgccttgatatgttcggtgtatcgatcgatctccgtaggtctatcttataagttcctcggaagtcagtttatgagaaataagaatagtacgtcgcatatgcggtcaggtcattttgtaatcatttcggtggtcttctaagtgtatttttatagatcttccacccattctcaggtatagcaagtctggctatcaaacgaaagctattacaggaaatcctcagcatactcctcatacttctgcatgaagtcctccatgttgaacttatccttcagccgcttatctgatagaatgaaattgcctgtctcaatgtatccttgtcggaatgctgtgaatagtgtcgggctcctcaaataatgtggaatgaaacgtttattatcccctgtcaccattgcccctttgaaagcttgataaacaacacctgggtcctgattaaggtctactgcctcgcattgtccaaaatctaagagatatagctgaacggcgcggtattgaaagtccggtccatgctcctgggcatctatgactgaagttccaagcacaaactccacatcatcgccgttgacggccgcggcccaatgtaaggttgcataggctttgcccatcgcattcgcaaaggggagagtctcaacgccaacttgctccatcgactcaaggcatagagggaagtttcgcagcggaatctcgtgattgatggtaccattttccttgccgagataaatacggataagacagtgcttgttttcagggtggttaaggagggcttccattccagcactatcaagatgctgctcgggggcacagaattgggagatcaaggcttttcgtacgacttttggtaatggaagaatccgttccattattaccaggttcccaggtactcgatgatcctcgggagtttttggtaagattttatcccagaacccgctattctctttcctagagatcaattcgaagggttttggaacgtggattcccccgttggtagactggtaatgttcgaatgcggccgaaacatcacagtgaatcttatactcatgatagaggtttgatggtagcttttcgtttcctggactttcttttttcaaggccagcggcttcccgacctgttcgaagatagctccctgtagaccagctccgatttggttgagttgttgcaagtcgggtcgagaacttgcagtctgagaaaggcggccgaaggaagaggccgtcaagataacagacttctggctgagggtctgtttgagaatttctgaatcggtcatgcgcgcgagatttgatgctgaaaattcccgagaagctctggcattctctgctgagctagccgattcatccctgccattaccttcaaaccgttgatccatagtaatcggtgctgatagatggcttcagttgttgtgtattgtgtattatgtgctgtgtgtgtgtgtgtcatgtagtcgtaatgtcctgtgttctaatcatgacgtccacaggccacgtgctcgttcccttctttccaaggttatgctatcaaagtaagcgagaacgatctcaatagttacgtgtcagagcaagttcaagttaagctcctatggaggtgactgactgtacgtcagagcaagtgaaatgagtataaagcccgatatttatcacaatcctattgagtacagcgtgtttgtcttattatgttcatgtatagtggcaagatatagacacgaatggcacccactcatatatgatataggtagatgggcagatggtcaaacgcccacaaatgtgccatcccttttttcgtttgctctccggccaaatatgaaatgtttcacacttgatttctcactctcttcccttcacttctctgttccattcatctacaacttctttcataccatctcacaacatatcttgtactaaaccacttccattaccttcttcgtgtcaaaaaaggtatataaaacaagtttccacaatctttgattaaccaagctaactagtgttgtcaactggagacatcgactacgatgaaggtcccccttggtccgtcggagcatccaaaccagcttttgcggaagcttggggcccagtatgacccggacctgtccattagcgatgcttttcgtctcgttggcctacggcgaggctggaaacaaggatctaagacttggaagagaaattggaatgcttgcatgaatagcgagtatgatcggttgattggctgccgggtctctagtctcgcaacttggcaacagctatgtgctaaagtgggaatcaaggattccttcagttcaatcacccagtgcaagaaggtaagacgataccactatctattttcaagtcacttgcttactattgtaggccctggtccgtgtccatgtgaacatcgtcgatgttctagattcctggaactccgatgtcaccccaatttgtttcagaaacaaggacgctcttgctgcgtatacccagtccagcaccaagttctttggccgagagatcgcaaagcaggataaggttctccgagttctgttgcgcaagctgctttgaagagtacagcgacatgtcacttccagggatatgatcccggagatgtactgggtgcgcagttcaagtgtggacgaaatcgatctgggaactacacgacaattgaatgtgggaaatttggttttgaatagctgaaatacctgaataacttgttgaaagcgttgtgtttctccatggtatagattatttcgggaggtcctcgtaatgtacatggcttcggtgtccttaaatgctgtcgcggcttcttcatcgtcatctcattacccccggtgttagaagagatatgcaaggtcccgaaactgcaaacgtcagtacggcaagctgagcctactaggcacctacaagacgggtatccaaaacaatagtatgtctgtggccgacaggcaaataagggttccgtttttacctaggcacaaaacaccgagtggcatgcaagctctttccaataacgaaattggaaaacattctctcaaatatcaccatatatcttctaaatacatctgattcaaggtatcaaacatgttgtagtcgctgggtagagaattggccgagaatgcaaagccgaggttattgatgaacagctcatcggggttagaagctgccccaagtccgattacgtcgttgttatcatgttgagtatcgctcgcagtcggaacatcaaaccaattgatatctggaagtgctgtgggcaaaatggtgttttcaacatgcaggtcttttgggtcgggcagaccttggaaggactcagtcggggccatcggccctggatagagatccccgtcttctggttgatatggaattgtgcaaaggctattgcattccaatgaaggagcgggaggcatgtgatcaatatcacagttcagtcgtttgcaatataatttctccagattgcgtccgatacgcttcgcgatattccaggacgtcgagagttcccgcaggacctgaaggcagagtcccacagccgcctgtggtgatggacctcgcaaactctggttacctgtcccagttttcacagtgggatcaacgcaccatctatcaatgatgatcgatgccgctgataggatgcagtgtgtggctgtcatggggctcagtttaaagctgccaaatgtctgtctatatttctgggcgacaatgcacattcctcgggcggagttgctacatatggtcatgactttctgtttacaggcaggcccccattctttgtggcttctgttctgttgtgtctgtgggtctgggggattgccaacatcttgagtggcagagttgttgctcagaaagggcacgcaaagtaaaatgcacacagtatggtataccatgcacaaagtgtaggtgtgaggaaatctggagggaccagattgacggtcgactttgagctctggaggtagatcgtagtaccaggtcttaagttcaagcacacaggattcaaaaaatgcgcaacgttgttggggttggaggagtggctttggggaccagcttgagcgatatatgtcagtgagacaggtagatgtaagaaatgacatggtagacttacaatgtaagaaggactttctcgaatatacgacacaggtcaatcattgccctatgcaactgtaccacgtctctttgagaagcggcccttaattgtctattgccatttgctgagggcaaatagacatccgaggcacataaagggaatggtttgttgacgacaccctgggagtcctgggtgataaattaacgtgagtttcgacgcaaaaaaattattgcctgtggtacaacataccagtaacgtgcacaccctccccgtgtagctcgctgacaatttgtcgtgacaatatagagcccaataaatctgccttcgcagctcaatctcgatgggtggaagagcaactgctccggaaaggaccgagggatccatgttgaaacccatgtctaaggccaggcgattggccataccttggtgaagccagccagcagcatcagaccccattgcctatcagatattagtttgattggctgggtgaaagtctgagatatcacacttacaatataagccatgcccatgattgccaaagactggattgttgtgatcttgggccatctgaggtcgtgttgaatcaatctttctgccctatcaagaaatattttgccggctgtgtttgaatcattggggtctgatctcacttctatgcgatcgcagtaacgtgaacctacagcgaggatgcaatttaaaagaagggggctgaagtatcgcccaccacatctcatagattctcgaaacagtttttcgtttaccacctgaagccatggctgttcccactcaaaatacaggtcgagcaagtgcgactgaagctcgtcttctggtatcaagctttcttctaatgactctgtactcccattcggcggtgtttcaccagtctgcatgggagggccatcggactgatatgcctcttcgctgggcgaatctggagatgattagcgaacctctatactgtggcgaaaaaaagaatggctactgtaggcttgccttttgatgaagatctaaatagcaatcgcccacttgtcggtccaaaataccgcacctcgccatcttgatcgaaatttaatgactcgtcaagcgtcaatgcgccgtcaaacgtagtacacaagtcatcaacattcgaggaagccggagcccactcagggttaggctctccattttttatcatcaattgaatggcagcatcagggtcaataccatgcgtgtgcagtacacgctccaacagttcaatgcgattgcgcagcatgactacataggacttaggtgcgggttgccgcccgtcctctgctgtggagtactcgcattgaacgccacggtcaaggcagcgagagcaagatggtcgaacaccatcacactattttaatattagcacaagctttgagtaatacttggtggaacaattatgatcttaccttagctcgtcgttgtcggcatgtctcacaggctcgggacgtatactttctacccggtcgcttgcgcctagcaggttcatccggtgctgtgggcatagctgaggtatacgggaaagaggaatttgatccagtgcacagtagactctagtactttaagcttgagattggaagccttcgactacttgggattcaggaatggaatcttccgaccttggagggttgcccaggtggaatggttgtgattacaaatcaattgcctcaggcaccaaggcataaagtagtcacccttacaattcaggccacagggtctgatgctttgcctcactgcctcacatcatacaacgacttagttatctgtataagctacagccaaatagaattgtggtttaatatttgacctgggagagttgttttcccaaaaagacatattgagaatgcggaacatattgtgggacagaactgacttcgtgtccaaagtatgttgtagttagtatatgctcctatacgtaatgacctctcgtcatgactaggtagagtttcatgctagacagacatgacccattcattaatacatgcctataggatatcggtgcaggctaaatagtgtagtaggaagaggaaagcgtaaagtttactcggggggtatctcctgttcgctccaaggtcataatgaaataaattgtcgtgaataagcctattccatgacactatcatatctatattgaagaatagcaatggaagatcatctccaaaaaaataatgaagccaaaccatcagctgactaccccgcagatgcgcagaatccaaaaaaaaaaaaagaaaaccttcgaaggtcggaaaagatgaagacaaataggtggagcaacattgaatgtggcccccgaacattccgggcctattcataggatgtttggatatattctaaggagagggggtagaattggagtcacgtagaatctccaattgtgataatattgtgctatatgactggctcaggttgatatggatcatgccagcaagggattatgagatcgacagtttctttatttccagatatccgtggaacaagtgtggattgaggatagaatactcctattacaccatttgtttcacagaatatctctctcctaatctcatactatcagatatcagtagtgcaaatgatgcagttggagagggaatgcgagctctcattgtatggggaattaacaattacatccggtggcgtccaatggacttggagaaatattttctttttctttttctttcttttggccttttctattttgcagattcggtggaaatatggctgtccggcatgaagggatatatatggtacgaagtacgaagtacatattacatgggttggatgcttttagacaaaagtactacgtctagaatagtgcttatctagatagtaccaatactgtctgtatatgtctagattcagatgtatttcacgtcctttatttgacatgtcatgacgttgagttacaaatataagatgtatataatacctataggagctctcgatggccatctcccaccacagaagggatcaacaaagtacaaaatcttgatcctatatactatatatgcacagtaaatgtccaggatatcaaataaaggacaagtcaacagaaaaaaaaagaaaacagagagaggtgggaagtacgtagtgcaggaaaagcacagctcaccaatcaccgccctcgactccttcgatttcccccccatcacgactcttcctcttaaacattctctcgacttgctcacttctacccatttctgtgacccttaggtctcaatttcgatccagtttcgttccctttctcgggtcagcctcctctgaggttgacgttgtcgatctagcgcgtcgctgtcgcgccattccccgcagagagacggcttccgttatcctccgtctaacgtttcgtgtttcaacctctgtgttgtctcgaagcctttgaatacacaaatttaacgttggattggtggactgccatcactccgagcttgcattgatctgttcccaagtcttacgacctcactatggacacttgatgctacggatgaatcaataacctcgattaagggcacccgcgctgcccagcagacggtcctgcttggctggaacaacactcttgttttattcaatttacctcgattcatcgcactgtcgccttcctaccccccttgaaccatgaatcccgctcggtcgccggagcgagccagcatggccagcaatgattcccccaaacatacgagtaagtaactaagtaaataagcagataagcctgcccctaccgccccccccccccccgggggggggggggggggggggggggggctcggaatatcgatccgaagatggctcggacattgagtgataatatgcgcgaggaacgtgaggatttgaaggaagcggcagaacagactttgaacatcattgtggatatggacctggagggttgcgtcaaatgggtcagcccatcgtggaagcaggtggtcggctcaccccctgagtcagtggagggccatatgatatcggaaattctgctgggcaacaaggatgtcttccgcgatgcaatcgaatccatgaagcaggatgattcgcggagtcgtttcattcgcttcgccctccagatgggaccggattctgtcctgaagtacgcccctgaaccaccaccggcggctagagagaaccgggccatcggggaaaagacagaggacaacgttgagaagtcccaggaggaggaagagcataatcacaatgtgctcaacatggagggacagggaatcatggtctatgaccggacggacgatgaagctggccatgtgcgtacctcaacaacctcaacaatgtcttgttgcccgccgccgtttataccactgacaccttctgaatacagaccatgtggatgttacgacctcttaccgagcccagagaagtgacaatcgatctgccgcctctgctggttgagtctttgggtgttggggcggaggtattagcgaattatttgaccgaattggctgaggctgcagcgacagaacccgattcctccaagcatcctgccccgaccccggtcctctgtcgcatatgtgaacgccagattacgccatggtggttcgagaaacactcagatctgtgtctgcaggaacatcgggctgagatggatgttcaaatggcacaggaaaacctcaatgagcatcggcatgtcattgtcaaggtcttagatgctttagaggcccgacaaggcagacctttgatcgggggagatggaaatcccatgcccctcccccaagcggagtacaaagggttagccatcggcccctcgtctgccagctctgctccgtcatccggtcctgtttcagagagtaattcagcgcccggcacgccgcctcggtcgcgcgaacattctgcgtccgatgctattccaaaccgaccgcgctccttcacagtgcggagaccactggctcgtatcgtcgaactcgttcttgacctgtgcgatacttcactagagattagtatgccgatgatcaaggaatcttcccggacagacacagaggacttccggacgctgtcaccacaatctgaatcgcggatctctcaggttcttcagtggcagtccccgagctctaacaccctggaacaagaacagggtctcgctgctttgtcggcagacactgaacaagtcgccaaggcaaaagtggatgccgttgtacgtcatcgcaagattgttgaatacgccgaacgaattcgcatagaatatacagtcctagtcgaggaatgtattggggcagcgctaagcaaggcggagcgcatagctgctggtcagctcagtgattcatcttgctcatctgatgaagaattggcgcctgagagcatcatcgacggcaatattactccgggcgatagcaatactgttgccgaggaagattccccctcacaaatcatgagccaagaaccgcaacaaaggccctgtccagcagcaccctctccgcggcgaccgacatctgcgctgactctgtcaatgcgtaattcgccagatcggtctttgctctcacaatcggagcgcagaccatcctccgcagcagtatccacaggttctaacagcccattggaatgtcctaccccgcgatcctataagagtgctgcaggactcctgggtacctcacagccttctcgactgggcctttccctatcggaaattgatgctggtgagactagcgacagcagtttgccttctgtcttcccgggagctataagaacagagtcaccctcatctgagaggagcttcgatcgaaagcgtcggagcctggtactgcctggactttcgagttctcctcgtcggcaaccttctcccgctcgaatttcaggtccgcattccccgttgcgcatgccaaagccccgtatgtctagcggcggtgaaagcctgccgtccccgatagcatctccgtctgcatacgcaagtgaattggcccttcatcactgccgccaccatcgccgggagtcctcggcgaattcttcagatatcacgaagcccccaccttccccacgcctaccttcgatgagccagcaacagcctcggcctgcgccattgtcgatccgcgattttgaaataatcaaaccaattagcaaaggtgctttcggcagtgtctacttggtgaaaaagaaggccactggcgagtattatgcaatgaaagttctgaagaaggccgacatgattgccaagaatcaggtcaccaacgtcaaagccgagcgtgccatcatgatgtggcaaggggagagtgactttgttgccaagctttattggacattttctagtaaggattatctctatttggtgatggaatatctcaacggaggtgactgctcatcacttgtcaaggttcttgggggtcttcccgaggattgggccaagaagtacattggtgaggtggtgcttggagttgaacaccttcacagccgaggcattgtgcatcgcgatttgaagcccgataaccttctcatcgaccaaaagggacatttgaagctcaccgactttggactttcacgcatgggattggtcggtcgtcagaagcgggtgctgaagaaccccgatgagtctgctccggatctactgaaacaaaatgcattcccccgtgcgatatcgattggatcttctcgatcggcctcattcgactttcaagcaagctcatcacctggctctacaccactcatcaccccggaagtgtccgccagtgccgttcagccatcctacttcagcctcaaccagaatagtttgagtcggcaaagctctcgtcgagcttcgggataccgcagcgatagcatgggcagtgatggtctcaatggaatgttcagggcattctcgcttaatgacaatacacacgaacctcctgtctcatcgccgagtatgttttcaaccagcatggttgaagaagagggccaaagcgaggccggcgagtcccctcgtcttcaacccctgcatccaacattcagcaatccattggcgcagaatacccctccccatcaaagcatgatgcctccagtgatggctctttttgatcccgaggatcacaatcgccgttttgtcggtacccctgactacttagccccggaaactatcaacggcattggccaagatgagatcagtgactggtggtcattgggatgcatcatgtttgagttcatctttgggtacccacctttcaatgcggacaccccagatgaagtcttcgaaaacattctccatcgcaggatcaattggcctgaggatgcagaggagttgacttcagcggagtcgttggatctcatcaacaagctcctggctctcaacccccgtgaccgaattggagccaatgtcgaagagaagttttcaaatggcggtgcggagatctgcagtcatccttggttgtctgacattaactgggacacactgcttgaagacaaagcacaatttgttcccaacatcgaaaatccggaggacacagagtactttgatgcccgtggtgctactcttcaatcttttgcagaggagttggaagatgagaactcaccacaaacgtcagcttccgctggccccgaccgacctcatgatgcactgttcaaggtccgttctcaagtcaattcgtcgaaacgacctttgatgccactgcacattcctcctcacgttcgtgatgctcgggattcacgaagtcggagactgagtgaaccagccttggccgatgattttggcagcttcaactttaaaaatcttccgatgttggagaaggccaacaaagatgtcatccagaagatgcgccaagaggctctgcaggcacagcaccgacaacccagttcgtcgtcggccgctcagacctcgagcacttcatctcagccgtcattggaagggagcccactgccaatgtcactccagcgaactctgtcacagaacaagggcaataatcgaccttcttccccatcaggcctaagtcaaacaaactcatctcccagcaggccatcgcagccatcttctcctctcctagttcagttcagcactgggaataatcaagagcggcgcaagacgtcgggctcctcgtcagcctcctaccaatcgagtggggcctttcagccttcctctgctgaccagggccgcatgccaaatcttagattgggctcagtggcatcctctcccgtgaaatccaaccgaatgccagctcactcccctgacaagacgggcaacaatcaacgccatggcagcgtcccagcgagccgtacccgttctcacaccattggctctcaagatggagatgtttccgcgttccagaaagaaccctttgtgccccatcatcctaagcgccggagtcagctctttgatatctcaccttcatcctccgacaatgaggatccacgcacgaaggcactcttgaaggtccaacgccggcgacaaagctctcgacggttgtcgcaaatcaacatcctagaagggccctttttccggccattggatgtgctcatttgtgaagatcaccctgtctcgcggctggtcatggaacgcctgttcgaaaaacttcgctgccggacgatcaccgttacgaatggcgcggaagctgttagatacgctctcagcgaggttcagttcgacataattatgactgaatatcgacttccccaagtcaacggagtagactttgctcgaatggtacgggagacacgcagtgctaaccgacatactccgataatcgctgttacgggctacttgaaagacctcccggagaatcacaacttcgacgccctgattcaaaagcctccgacactacccaagctgaccgaggcgctttcccagtggtgcatgtggaaacctcctccaacggactatgttccctcccaacctgttcctgttcctgttccgggatctaatgctcggtctaccgccgtgatgaatgaggacagccctagttccgcatcctctggatttgtccttaatccccccagctctcaccgaggatcaagccgcgaagattcgctcagcagcagtgtgttcggagacatggagtctttcaaacccgaaaccaaacccgaggacattcctctgatcataaatcgaacgtctgatgattgggatcaaggccacggtggattagggatatccgaagagccaatgaggaactctgagaggccaaatcccaactctgtacctgtgcctcaccttcttcatgctgcatcagcgcccgcggccatggattcaagcggtgaacccacaccccggaggcaaccgtcaagtgaagctattcgcgccaaaaaggaatccatcgaaaagaagtggtacgagggcgccgaatcgggtgacgatgaagacgaagagcttggaaactcccaaacacgtcgcagcccaccctctcgaaatcgccgcccgggctcgaaactggggattgagatgatgcggaccaacagtcggggcagcgttgttagtggcagtgaagaactattgaagaaggagagggaggctcttcggaaccaagccgcggagtccacccataacggagacagcgatggctcttttggttctcctgccagtacaagcttagaagatcgttttgaggcccttagcatccccgaagaatcggagggtgaggagccacccagtcctcgtacgtccccgacaaggcttggagcacctgtctctcagtatcaccggccatctctagcgcatcgggatacctcgatctattctggaatctctccgaattgtacatcgaagactagcccaacattgttgagtcagggtcaaactacacccccgtcggactttccgccgaggactgtttcccatcccgctgtcctgccaattacccctgaagtcaaaatctccggcagcgcgctgacccgagacgcgggttcgggcgtggacgccaactgtagtcccaccccggacgctgaagctacgccgcgacctcttcatccttcccctaacctggatccggagcagacgcctcgtcccccggagcgacatcgatcggactcgagttttgccttcaaaagatgatcttgcgatatctttctattctgtctacatattatctgcacacctacttttgtcttctctgtaaactttcctgtgtttatctatcccggggaaaccttgtaccccgtggatacattgtcatatccactccctcacgtctcttatgtctgaatgttttctttctgaatctcggagcaaggtgttccggtctttcgttttacttggcattgtttcatttcatttcttttctttccagtctttttttttttttttttttttctcagcgagaatagtctctgtttcaacatcttgaccatgtggtggaaattccaacatcagcttgacgctgtttttcctttttcctttttgtgttttatagtttgttaggataccctgaggatcccgaaatattatcttgtaccagtaagggtacttgtcttgaagccgaagcattatttaactactagcgcttcacagccacctcccacattggcaatcggcgatgatcgctccgatcaagcgttctgattggacacaatcctgattacttgtgaagatcttagacaagacctcggttagtgagattaatattatcttgtccagagtttaccgttttgtttttctgcatccaacgtacaaagtacgtgatgatcgcaaccgtgcataagatacggagaatagctcgaacatggagagcatggactccgtaataattggtctaatagcgcaccgagcgccaagaggtcatgaaaccgcctcagtgcgtaagtcagtgcttgcgacgcatgttgtatgtacaacgtcactaaatcataggctcggatttcttttggtttggaagggcaacgtcatggttgtatcacagaacacctggatgtaaacattctatactctttactgtttactgttttcctagaatatatactgtatgttgtatgaattgtagccaccggtgtttacatgacactctacaacacacctaactaggttggaggcgtcctgggcgttcatgatcactataagcataaagccagtctaataatagtctgacaatatatattaaagttgctatctatcacagactcggtgttctccttttatgaacacaatttacactttcaagtcaaatccaagacaaaatccctttctcgccacctggtggatcggcaaaacgttggcaagccgtgatgggccacatttgtctcgaagatcattggcagttgccctgcacattgcgtatgtggaacatcttatttgactgctcccaaggttggtggttgaaatagaagttggaatggagttgttgtgtgtaaaaggtacgttggctgcgatagactgttgtatacaatgttgtataccacccctatatacatcccaacaaccccttatttgcgagtcgcgatgctctaaatgaaggcaattaaatctaaatcgagttaatttcccacaaccaatagcgtatttataaaaccgatcgagatcatcgtgaaatgtaaaagtccaggctctgcactgttatgggtcttccccatcaaactccacttggccatgtcctcttctcttccttcacactctctcgctgtgttcttttctgcctctctgctgtcttttttcttgtttgcttcggttgcgatgtcatcgagacgaaacgtataatatacattcaatatacaatcccccctcggtcactacagagtacattccagtctttcctctccgccttgacagaatttcgctcatacttggcccggtgccatcatgtcgtcccccgtggaggaacgaaaagcccatatcgaagacaaggacaagcgaaaacactcggacgtctctcctccctccaatgatggcacttatgtgaccgagcctgacgctgatcgcgacacgggtcacttgaaggtcgacactacacattatgagcatgatgatgatgggcatccgccaatgcgcaccccatccgcccgtcgggagcaggccactcgtctggaggatgatttgctggtcctgcaggccgagcgtatgacctcgcattcgaccggcgcaccagacgacgaacacgatcgcaattctatccatcgcacccgttcgcgacgctccgaagccgtcgatgagtttgatgaagctacaaatcccctgcacgaaaaggccgcaatttacaaacccccggagaatccaaacacccagtttgccgtctttgtgaagaaactccatcagtcgagtttcctcgtgcgctacttgacctacattgcccccattgtcctcattctcttgatcccgttgctggtcggcgctctcaggtttcccaatgccagtgtcggcggtgtacaattgctgtggttttcaatctggttggaaattgtctggttgactctctgggcaggacgggtgagtccaatcaatgaatcatttcccaacgagcattactgatctatttcctttcttaggtggctggcaagtgcttgcctccagctgtcggtctttttgcgagtgtctttaccaacaacgccaagaaatggcgcgacatggcgaaacagctcgagtttcacgcggcgctctttttctggtggcttggcgtggagatctctttcctgccaacgatgaaaaaccaccatgtggatggtgatacggggaccaagggatgggaaatcactcttaacaaaatcatcattgtcatcttcgtgtggactatcctgaatttcatcgaaaagatcctcatccagttgattgccatcagcttccatatgcggacctatgcggaccgcattgagatcaacaaattccagattggcagtctgtccaagctgtacgattggtctcggtccactcttactgagaaagatgaagcatttgaggagaaggacgacgaaccgagttccacgggagtcaagaacccgttgcactatgctggcctggcccaccggaaggccaagggtgccctgaacaaagttggaaaccgggttggcgatgtcgcaggcgcggtcgtcgctgacgtcactggacgcgcgacgactcgcagcaccgatgcctatcaggtcattttggcgctcctgcgaactaccggaggctgtcaggtcttggcgcgtcgtctgtatcgcacctttgtgagggatggctttgagaccgtttttggtggtgacttgaaagccgcatttgaggacggcgaggaagccgaagctgccttcgctatgtttgatcgcgacatgaatggtgatatttccatggaggagctggaggccgtttgcgttgacattggccgtgagcgcaagtccattactgcatctctcaaggatttggattcggttgtctcgaaattggacaatgtcttcatgttcttcgtgtttgtgattgtgctgattgtatttttgtcgctcatctccacctcagccgccggtgtgctcacatccgcgggctctgctattctcgcactgtcctggttgttctctgctactgcccaagagttcctccagtcagttgtcttcgtctttgtcaagcaccccttcgatgttggtgaccgtgtgaccatctacggtaacgctggagattccggtcttggtgatgattactttgtgaaggagattactcttctgtacaccgagttcaagaagatgcaaggccatgtcgtgcaggccccaaatagctacctcaatggccttttcatcctcaatcagcgccgttcgggcgcacttgccgaggcggttccaatcattatcaagtatggcaccagcatcgaccaactcgactccctgcgccagcgcctgttggagtttgtgcgtagcgagaaacgcgacttccagagcaacatcctcaccgaaatgcgtgccgtcaccgagaacttttcgctcacactcaacatcgtcttcttctacaagtccaactggcagaacgagggcctacgtttgcagcgccgcaacaagttcatatgtatgctcatggtcgccctccaggaaatcggcatcgagggcccacgcatgaacctccaaggtgccaagttcgacattccgttccacgtcaactatggcaatacacgctctgccgagcagcaagcccctatcgatgccgacccagtccccatctcagaagaatctcaccacctgccagagaataccggatccagcagcggcagcgctatccgtcacccatcgattcttcgcaagggtatgaacactgccaatgcccgtgcacgcggcccgtctgtctcacagcacaaacacgtcgacttctccttgggcatgtccaacatggcatccaacgatattatgggagatgtgtttgaggatcggggtgtggtcgtcggtgaagtcgtccggtcggccaaccgcgatgctgcagaccgccgcatccaggaagagaacgaggacgaggaggagcgcaagagccgtacatcttcttcccggcatcgtcgcccctccaacatgagcgctccctccaatcatgatgacggtcgccggtcgaccgacgctcacagcttccgtagtggccagtcatcgctcagccgtaaccggttcttccaacaccgcagcagcgtaggtcacgatcgcgatgacttgatggagcaaggccgcgtcgatgagcctactcctccgccaccggccacagtccctggtgccaaggagcacccatattgatttgagatgcggtcattttcaatatcgtgccatattcactctcccagtgaccaatttgatatcgaaaacggctgattgaacactgcccgctgtggttatcttttcccctagcctctttggttcaagcgcagtatgagacatgtgtctgcaatgaggtcggtggtgaaaccgcgacctaagttaaatctcataggttcagacatgagaaagattccagtattgaagcgaaattgcaagtggatgcattgcaaatctgtgtgaatatataaagtctacttgatcagagaaacaccacgctacactatatatattttacaaatttcaagtcgccttcactgtattctagctagaacaccaatgggggaaatatctgaaaatacaagcctttcaagagtttcatcggtatctccgagaatctgctttactgtctttgtatggcgcctttgccccgttcctgctctcctggagatctgtccattcgattgacgaagccctgaatttgatcgacaagtcgaaggacggaaaaaaagtatcaaaaaatcaaatcaaattaataagtattatgtgacttttccccttgttgtataaccaaaccttgaaccctctagtgataacgccatgatccatgcaaaattattactagtgatacaagtcgaagattcccttcaactgtcagcagcgacattgagctcttgaagaaccttcaatgtgtgctcataggtccacatcgtcaccgcacttgccggtgccgccttgagtaaactgaccgtcaagccgcggtacaaaccacgcacaccctgggtgcgaacaatcatggcaatacttcggaggacgccgttgtactcagggatatttcgatgaacgtaacgggtccttgttggaccctgtacctgcaagcgctttcgcacgaggtctagggggaaaacacccgtcttagccagtacactggccaccacaccggctgcggcatcgcctgtaccaaacggcagatcctcccaggtcatgactggtctaaccgcctcgtatgttgtgaaaaagagtcccatgtatggcacaatttgtgccacagcggcagaacacccccggaagaatcctggtgcgccctcctgccgagcgatctcaacaatcgaggcgcgaagcgagctatacacacggtccgggccctgcgcggcaaatcgcgtgcggaggaggtcaagcgggtatgtcattcccgtggcacatccgcctcccactgcaccggaaataaaggattcgacaggttgggggagtctgtaggagccaagttgggcgagggcttgggttgttcctcgatacgcggtgaattgcatcgcaccatagcagacatacatcatttcggcaggaatattgcccttccaaaggccctgtgagaacaaatcccagttagtatattgacattaatgtcgggaagcaaggtaatattttcaacgtacagtgattccctcttgcttcataatcgtccgcatagtggacaatgtccccttataaacaggcccattgacactattatgggacgcagggtctgacagcgaatggatttgcaactgcagtctgatcttcacgacgtctagcggcgcaatacagaaccgcgagatcagccctgcaatcccgccggccaatacgacctgtcgcttggtgccttcatctttgagatgttcgccaccggccgacatgagttgaaagtgctttctcttacagactagagatgtctgtatggtggttgggttaggttaagaatattgaagcatgaagacccatgttgagtcgttgagttcaccttgggaatgtttaaaaaaaaaacaacaacaacgtcaattgggcaatttacgtaagttccgggctggccctggcgaagaatgataactatgtttgcctgaggtataaatattggcctgaggtgtaatagtatgcctgaggtattaatttactgcctcaggcaggaacgcatactattgaagccgaggtaacttatagcttccctccatttgtcccgcgtgctccgcgaggtagattttgctctccctctctgccatttcactgattaccttttcttcttaactggttcacgggcccttcatgcatcgtctccgagcttcagctaccttctggcaattgccaagggccttattatactctaccccgcgccgtaacttcatagctaccccgagtaggttcaacagccccgtagagccagactctcacgacaaattggaatctctcgccccaggaattgaccatccacttcccataccacaagaccccagcaactctaagggggacgtgccagacctcacccccgaggtggtgacaagaaaaacccatgggaatggcatcctaaaagtgggcaaaaaagagtcgatctggactggaaaagaggaattgtacttgcatatggacaaatacacaacactcaaattgccatatacttacctgcgcgattcatgccagtgtgtagtgtgcaaggatcaacactcgaagcagcgctcattccgcacaagtgacattcccaaggacattgttccaagctgggttaattgggatgggaacaagctatcaatccggtgggacaaagacattggggggtcacagactgtacacgaatcaacctgggcccgtgactttctaaagaatcccattttcaacactcatgatcagcatcggagcgtgaactccaaaccgatcatgtggggacaggctaaaatggagaaaagtcaacattgggtgtcttacccggactatatcaccgataattccaaacttgccactgcgatgcaccagttgcagcgtctgggccttatttttgtgaaggatgttccagactcacgatcgatggttgaagccattgcaacacgaatgggaccactacgaaacaccttctacggatcaacattcgacgtgcgcaccgtcccagaggcaacaaatgtcgcatatacaaaccagttccttgggtttcacatggacttgatgtatatgaacgagccacccggataccaactcctccactgtctgcagaactcctgctcgggaggcgagtcactgttcgccgacacattttcggccgcgaaactcatgaaggagcaatacccaaaagagtatcaagtgctaagcgagcagcggctggggtacgagtacaggcacgaggaccacatctactacaacgaacgacccgtctttgagcatgattccgacacagacgagctgcgccatgtcaactattcgcccccctttcagtctcccctcccgaatagccatgatgctgagcatgtgaacaagctactagatgcgcttgcgaagttcacttcgattattgataatccaaatagcatctttgagctcaagcttaacccgggtgattgtgtcatctttgataacagaagaatcgttcatgcccgccgccaattcaatgccagcgtggggtctcgatggttagcaggcgcatatgtcgatacggatgctctgctatcccgctttgctgtctgtaagaatcagcatccgtatgtttggacgaaaaaggcacagaaagagttggcgggtaacaatagtggcaacaactagacaaggagtgaaatataaggaaaataaagaggtcaagagggtgggcaaagaggagagagaggcttacaacacaaaaggttgtatagtacaaaatatgaagatcgattgacccaatatctgaatcgtgcccaagagttggcatcatttccttctttccagcagttgatcgaatatacgaaagtgatgttttgttagtttgggctgttccaagttgtgggcccatgatccatgcctacatatgtacatagaatcaaacgttgtaaatttattgtattgatattcttgagacccgagtggaggtgcagtgcagtaattcaacatagtcattgcggtacaaggtaagttgaactaccggtgcaagcatctgaagaggatgtgttgaatctggcatggcccacagggatattctgtgacaatgtactggtttgattcgacgctggttattccaatttatagcaaggacgtgtcccgcaacattgcgaaggatagatatgatcagacatgcgtataagccgtatgaagacaaaaacgtttatcattatgttagactttttagcatctagccccagagacagggggtcatgggtatcgtgcaacgatcaaccaaccactcaggcagccgcggtgggtttgttaactgagtgatcattgaggaagtcggggtcgctgttgatttcctcacggacctataccatagggttaataatcgaatcaaagaagtggagtgtgacggaacacgtacaatatccaagccacccaccaattccccgttcacccacaattgagggaaagttggccactcagcgtactccttcagaccctggcgcacatcctcatcggccaagatattgaagaagccgtacttgacactacgctcgcgtagaattccaaccagctgccgactgaatccgcattgtgggctgctcggggttcctttcatgaacagcatgacagatgctgcgttgaccagttgctcaaggcgggcaaatagtgcctcccgggattgttcgggtgtcagggtgggggcagacgcgacggcggttgcattagccgcatcagcagaagggggctcagcagcggtaacaggagactgagtagcagtgaaggggccatcctcacgagcaacagcagatagcggcggaggaatgttggctttcacaccgtccatcggaccgacggcacccgcgacatttccgcggccagcgtggcgctcgacagcgtcacgaaccttgacggcatcacttccactgatcgactctaatatttggccgctgcgtaagcacacaacgaacggcacggctgaaacgtcatactcttccgagatgtcaggtagctcctcggcgttgatgctgacaaacgagatagtgggcggggtagtggcggggtactgcgaagcgagggctgagagtactgcgcccatctgcgcgcacggggctgcccatggagtatggaagtataggacaactaatgcagacggcgatagggaagaaagatgcgaggagaagtcggcctcagacgtgatttcgatgagtgtcgacatgttggatgtgtgaaagaatgagacaactggaactgatggcaaagtcgggaatcggcgatgagaggtatgcttcgaaggcaagattgagcagtcaaggcgagcctaaagtcaagaagcgaagaagacttgtcagaagaatggcgtgatggataccgaaaataagccccagatttccattcgggttatcagatcgtttggcgtctctggcgcctctggcgtgccgtgtggtgtatgtaagccggaaaagtctgcgacacatattatccgatatacacgtgatctcaatcaacagcagcacgtgaccttatcgcgtatcatcatgaatttccatgccgcgatgctgtgcggcgaggaaactgcaaatccaaagacaacatgggaaaagagaggaagagaaagcttagctcggacgacccggttggtcaaccaacagctcaggtattcggtgtcgccgatacattgtcccggttgcagagcgataacccgatcagcgaaggttcgaacggcagccatgcgtcaaaaaagcgcaaaagagtcgacggcgagaaagtcaaatacccagatctcacatacgtcgatggaaaattagtgtcacctattcgaatcgccgatctgcaggggttgcttctctattgcttcgccgatggtatcgcaccccaatggatctccgtgaagcattctggccatgtgcgcaaggtggttgtactgatggtacctggcctcgagatgggcatgtttgatgggacaattcctgtgcaacgtgcatcagtcaccggggagcaagaaacacaggagcccaagatcaatgcgccggaagccaccgaggaggtacctaaagacgaacacgctgctgattacgagagatggaagcagggcctcccattgccggatcgctcgcatcgcttcaatcctcgatctatcacacgggaaaacctccctgaaccacttcagcccctggccgatatgtttccccatatctggcctgtcaaggcgccaggcgacaacaaatacaacaaggtccattcaccactacaggcgattcttatgtcctcgccccccaagacaaaaaatgatgactcccgtgcgaagggcgcacggcccgcaaaggttgagaaaggcttcgttccgaaacgaacaccaatcacagcttttgtcacttcacgcgaggatctactggaaaatgactttatcttgcaccctgttttcttctcttccgatgaggaaaagtcttcccagatggaggctcgtcagcgaggcagtcagtcggtggaagatggatgggtggatactcaagttccaaccctggagtccgctctaccacctgatattgaaattgagagtggcagtgtgactgttggtcgagatatttttgcgcttgactgtgagatgtgtattacagagggaggtcagtccgaactcacacgcatcagcatggtcggctgggacggcgaggtggtccttgatgaactagtcaaaccagcacggccggtgatcaactatctcacacgttactccggaattaccccggagatgctcgagcccgtcaccaccacccttcgtgatatccagcaaaggctcttgactcttctcacgccgcgtgcgatactcgtaggacactcccttaattccgacctcacagcactcaaactggtccacccgttcattgtcgatactagcatcatttacccacacccacgtggtccgccactcaaatgcagcctgaaatggctcacccagaagtaccaaaacaagcagatacaaaacggaatggccgggcatgactccgttgaggacgcccgtgctgttcttgagcttgtgaagttgaagtgcgagaaaggcgagcgatggggtaccagtgattcttccaatgagagcatattccgtcgactatcacgctctactcggcctagtcatctccctcggcctggagaagaacgaacaggagctgtggttgactggggcaaccccgaacgtggctttggggctcaggcaactgtctcgattggatgcctggatgacgatgcagtcgttagcggtgtctccgcggtaatcaatggagacgagtcccatccctctattccaggaggtggtgttgactttgcctgggctcggattcgtgatcttgaatatcttcgcggttggtgcagccgcctccctgatccaaacaacgccaacgaatccacaactcttttccctcctcccgaagaaacaacgccgaccacaacctctggcaatggggactcgacagatcttccgcggcctgacgtcttggctgatactctttcccggaccgtctccaacatttcgcgaatttacgactctctcccagcttgtacgcttttcatagtctattccggtacaggtgatccacgtgaggtgggccgtttgcaatccatccacaagaagcaccgtgaggaattccggtctggcaagccatgggatgagctgacatacaaatggaccgacgttgaggagcaggctctaaagaaggcttgcgagcgtgctcgcgaaggttgcggttttatgtgtgtgaaatgatttagccgaagctacgtatgccacactccaaatgtcctacgctacgattatgattctcatttcgcttccatctctgttgtatgatcgtctacaactgctgctaagaactcgatgtgcatgtttccttacgatagaatagccaaacacccagtaggatccaggtcaaacacaaaaaaggttcctttggccactggaaaaaggggtatgtaaaactgcagaaagaggacttgatatatccgaaagtgtgaaagattgtccgagtagcttgaagtgcaacctcagaagtcataacactttcattcacgtattgtaagctactaagttgcccatccaatccgtgttctgtatatatcccgtctggaatatcgggctgtggaagtccccacaggaatttgtggggcggaggtgggagatttctcccgacagcaacggacacgaacctttcgcccttagcaatgaatcccttcaaacgggcaaccgcagcctggcatcctgttggtcttgcatccgagtttccgagcatcgatgacgatgcccggattgtgccaagatgcaaagctttcaatattcccaagacaaacgacgccatagagcgagttgaagacattgacctaccaggagaactgaaggaccaagtcctggtgttcaaatacaagggcaaataccatgccattgatcatgtaagtcaaacggtttttccaattggaagcattgagctcacccattctagcaatgcccccactcgtcgttcccactttcacaaggccacctctttgatattgaagacttcggcatcgtgctcagcgcaggtctcacatgtcccaagcatggctggtcatttgatttattctctgggcgtgctgatcgcggcaactacacactcaaggtgtgggaggtacagctgcgcgactcatcggcacttggaagtacggaccaagaggtttgggtgaggcggaaacaaagaattggttaacattggccattagcatcgtccaattttccttagtgacttatcataaaaagtgcaccaaggctgagttgaccttcctggagtgattgaatttagcaggccatttaagctactcctcgcaacttgttcatctaactatccatatcaaagtattcatatgggtagcctgtcgatccctgctttagattttggctcgaatgcgacccatcaactttgtggagctcgggtagttcacgaagtagtaattgcacgagggaagaagcttgtctccatccaggggtaaattggtctcgagtttctacccaatcacttaatccttggacagtaggccaactatctgtatattgtatgcaacattcagccccatctgtcaagcattactcatttttctggcagccaattgctgtctataaaagcaccaaaatgtcacacctagcgcctccattaggatgaatcccgccaccatctcgatgcccaacgagtcacacccagtcaataccatgccaatcaaaaggttcgcacacccgccgaccatctccattctacccacccaaatatgagcgtacgagacccatgtccgggcgcggattcggacaaaggtaacatgatgccaccagcctagcagaatctgtatgagcagaaacgccacaatcattccaccgaggaactggtgagtgttgaagatcgccgatgccttcgcggaatcggaatcatggcgcttgttgtgactgtgaccgtgctcgtgcgcttgattcaaggcgataccggtgcccgccccgactatcatacaagtagttgccagcccctgcaagatccagtggtaggtgaacgagcgtggcgagccacttcgcaaagcgaggacgccgacaggaagaagaaagaggaagctacctgccatcatgatcccgtgggtcatttgcaagagcgcggtggccttaaccttgcgccaggtgttcgctgctgtagcagcgatgccggaaatgccgatcggagtgtccgaggcgcccaaagcctcgatattgggccgcagtggtggaaatgagggatagtagtcccccggctgtgtcagagagcgggccatgtcgacgtagaaccgtacccagccaccattgcccacgtggtgtgcatacatgtctaatggtgcgtcaaagctgtacatggggaatttctgctggttgttccaggcccttatccagggttgtgaggatgacagaggcgatatgggcgacgtaggccagcgagcacaggagtagcagatcaaggacaagtgggcggactgaggcctttgacttttagcaatggtgtgttgttcatgatgcatggatggcaaggcggacatccaagaggtttggagaaggcgaagatcggctccgcccatgtcgtcgtgggtgatcaggcgaggctggtgatggccatcgacggttcggatacttagcacgggattctcactggattcgggatccccatagaggataaacatcagggagcctgccattagagacccggtgccgatggctgtccatccgagatctgagtcgcgagttattgagagactgaggtagatgtcgtgggtggtggtggaggaggagttgaagtgtgtcgaaacacccagacggaaattcaccttgtcttccttagcatcatgatggccaaattggcagtattggacgggttcagcttggcagaccttgtctacaaacagcagaaatagagggaacgaaatagaccatcaacttcatgactagacattttgatgcattctgaggagatcactgtcgccccatgcagttagtagacctctccgtgcggcattcctttccctttctctttcttcctctggcagacaacttgccggcaaacgcgcagcttggcgcgtcggcgttctctttatgtgtctgcagagatgcttctcatgtgttctggtagatggaatctggcttgctttgtggtgcgaagctatatagacaggcttcagtacagtagctagtttcgtatcttccatcaacatcaccttttgctatctggttgatcacctcttccctcgtagtcagaacctctcatcacattccttgccaaggagaaagaggatgacagtgaaaataacatattcatactagcctttattctttccgaaggaaaaaagaggtaatcttgtctttttatgcattgatgcatgggaatgaccgtgcatgagtgaccttacaggctttggtgcttggcgtaattcgtatctttcaataacgattcagaagacagacgacagatgtgagatgtgaggtgtatcagccataatctatgcaatggagtgggctctgcttttactctgggcattgctaggggaggcagttgccaacatcccacactatcagctgacaagctgtaccaagattccgcccgaatggactcggcataggcgagctcacccggacgagatggttgacgtatcaattgggctcgtccagaatcgattacctgagctcgaggagaggctcctacaaggccgacatcctgtatcctatggaataagcatatctcacacacctcttcagtctctgacccttctcatccagattatggaagacatctctcagcccaagaagttctgcacctcatacggcctgtgccagagtcgattcccaagatccaagcctggctggatgaattacaacccctgaggggccaatatcacaatatctcccgccggtgactggctggatcttgctatgcctgtctcgtgtcttgagcagctactccaaaccgaatactgggtcttcgagcagccggggtctgggattcgagcaattcgctcacacgaatggtctctacctgctgacttgatggatgtggtcgatgtgattacaccgaccaacgtttttatccacccgaccgtccaatttcgattgggcgcacctactccaatctgggaagaggaaagtcatctgccgatgtatcaagacctcatcgatgaagatctattagatcgtggcagactggagattctgacccaggaggaactatccgcgaatcccacaggcgactggtgccaccggtaaatcatcaccatatctttatgaaatctaatttgcgcaccctaagatacaatgtttggattcagataccacacctttaaccgcagtcgcaaccgtttcgcaaattgtcctcagtgcgacccacggtgccgtcagcggtgatgtgtctctctaccaacgactgaatctactaggtggtgcattagccaacatcggtgccaacaaagcctgtggtacgtgtgttatctatctccttctttttctcactccccgggtataggagctaatatttccgacagaactaatgggtgactttcgcgtgggctttcttctgcaaaccccaccacggctccaatactttgctcaactcatcggaacactattcgccacaattgtcgccccggtcatcttcaaactcttcactaccgcttacccatgtatcattgctgagggcgcaaatggtaacagtaccgatgccgccgccgctcaaggccgccgctgtgaattcagcggaccctccatcgcgacatggcgcgcggtggctgtcgcaacaacctctggagcctctgggcagtcggctattccagaagcgagcgggcgattcgctgtgttgttcgcagccgtcggcgtgatgattgtgttactgcggaatatgctaagagctttcccagctaaggtatatttgcctaatatgatgatgatggggttggcttttacgatgccttcgccgccgtatggaattgcgatgttgatgggggcactgggggcacgcatgtggaagtggagggaggagaggacgtttgagacgtattcgtcatcagtggcagcggggttagtggctggggaggggattgggggtatagtgaatggagttctgacgattgcggtgggctggggaggagatggctgaggtactggtttgggatgtcccagtggccggggttagcgaattagttatgcttacgcatatctagaactttcataaagtagttttgtcactggttttagtcaatgcgtttctgcacacggctttgatttcaaataaaatttactagatgataagttgacaacgcagagaagtagttacacaggtacccaaactaccaagaccatatagaccatctcaataaatactctcatgaggagcttctgtattgtagttataagccagggactaccgtggacggtttgttgaccgaaataaatgaaaccactactcctagacggctgtatgtattgacatttatatctcttgaggcccttaacgagattaaaccatccagccaagcagaccgcaactctagcaaaagcaagccatagaatattggaacactttggcagacacagaagtaagtactctctttcgcctgtaactattgtcaatctggatcattcttctagaatgtcaagccagccatgcttcctcatacccctgcgtacatttgactttccagggttgacttttgagtctggctgatttgtgtgttaggattctatatattctaaggtagtatgtgggattgaaaactgaccatttatttgtccgcggtgtaagcggtggcagcatcggcatcccagcggcgatagacgggctcggccacctcagagcgcttgtcggcggtgtatgcagtggcaacatcagcaccagagcgcttcttgtcggcagtatatgcagtcgccgcgtcggtatcccaacgtttatcagcggtgtatgcggtggcagcatccgcatcccagcgcttgtcggcagtgtaagcggtggcggcgtcggcgtcggtcctagacttcaagccaacgggggatgcattgacgagggttacggcaaggaccaacgcctgggtgagcgcaataagcgtcattctgaatgataagcctcaaaaatagaattagatgagtcgagtggagatatcttgacagatgatagatactgttatttgcccgatgaagctccctcttaggtgcgagcgaggagatacttatatacaaactagagcacaagtatggatgctgaataaaggctccacagactcattcgaatattcagttcatcttgtcacagccagtatcctattacgccatggcaggggattctgcacggtcatcagatgtcttggatgtacacgacattcttgttaccccctttggcacaggatcatcgactgaccatgcaggacgatggcttcagcgcatgaagagcccactccaacccctccttcccctcacctatgatgagaaatgacctttttcattattagccactttgagacataattgcacattgtgcacttctcgaagatcatctcgcctccatatacctgcaaccactctcaattccacattcggcccccctgaatacctagacaatatggacgcagaggacctgaagaaagaacatcgaaatagtatgtcgcccacgcagccaatcctcgacattagttacaatgaccgagagcctggccaccacgaagtggaatcccaacaacactcaccatatcgccccgcctcctgggcacggagagccctggtgatgcatggattgataatcctcttctatatcggccttgccgtttcgtcgtggacaaatattctattgggggaatgtcctggtcggagttcaatctaaattgtttagtgagtgcctaatccatggtgaagggttgtcagagaaccggaagtgtctaatagcaaccaattttagcacctgtccatgagcacatcaatatcgaagtcacagtcatttacgacaagcccagcgatatcaaggctagttcatatgtgggagagcctagtctagtggttgatgaggcctggtatcgactcttgcgtcgtaagtcatcctggtacactttatattgagattgtccaacgtattttcttctagatcacaacatacgcattatggaagatgagctgcaagcaatgaaccaaacctctattcccctccgtcatgggggtggatatcaaggaatgatggccgtcttccacgaactacattgcttggtatgttctttctttcccattgtacattcacaattgactgagcacgtcggatacagaaactcgttcgtgaagccgtccatgccgactactattacgcagaaaaatcccatgccgagagagccatgttgattggccatacaggtcagttttattctagcttcttccgttacctgcattcacctccctgaaaaataaccgttaaaactgggatcaaagcattgcatcgaaattcttcgctcggcatccatgtgccgcgctgataccgccatctttccataccactggaacgacgccacgcggcttcccaatcccacatgggtgcagaagcatgaatgtgtgaactgggcctctctggaggaatggttggagagtcgacggattgatatattcgcccctaacatgcgggtgcatccgaagtatggtgaattttgagtttgcgttattacaccaggcaattcgttggctaactgcataaaaccgtacataggccccgcatatccaggagggaagcggatttccgagccagttggaccgaaagtctatcctttagatgaatgatggagaatcggttaaatttctggtcaaacaaaatcagattcgttcatatagcctgtaagatgattgaaactaatgatattcagttcaagacttacgaaattccagctctaggtgtgaaaattgttaagcatgtgtaatgtttcttgcaagcctaaaccaaatgagccattgtggatgatcttgaagcctcgacctttcttttctcattagaaagtggtattgttagtaaggtagagatgatgttctggctgttcagtgaaagtacatcataccgtgtactgtaaactgaagccattcctaccccatagatcatcagtttcttcgaattctgcgcgttaagaaccgaatctgaccgcaaaacgggtgcatacggaaattagcatagtgggaatggcttcattcttttagcagagagatttgcacggaatagcttcattttttgaatttggataccatgcttactaaagccactgttatggtaattcaggctcgcacatcacgtcctgatcgtcttcggcagtagttttttcggtagcttaaagcacttccgaattcatggcagtaaacacccaccgggttttagagctttatatgtttgcgcagttattcaggccacaggtgtgcttcgattattgtttcaattacttcgcatccctggaatcagaaatatcaattagcaaataatagagtatatttccatacatgtacttgatgtaacccacattaatttgagttagtcaaattcccatcgaacgtgattacttcccaggatggtggcctgctagatgcccatgctgatcaaccgccccgatcttgtcgccctcaccatttggatacgcaactctctatataggaaatcatagagcctaagtacatataaaataatgagtatttactattattttagtatcactagaaagcccttttcttaagcattctagatcatatcttatctttcgtatccagctagtgtagcgtctgaaattcgtggttaaagttaaggtatatctttgaggtttagggctacgggaagaatgacactaacctaattcggccatattttgtacgcaccataactacctcttaactgtattttaaccctttgaaattttgagtacttatagtagggaccttaaatttgtgcatccaatttactannnnnnnnnnnnnnnnnnnnnnnnnnnnnnnnnnnnnnnnnnnnnnnnnnnnnnnnnnnnnnnnnnnnnnnnnnnnnnnnnnnnnnnnnnnnnnnnnnnnnnnnnnnnnnnnnnnnnnnnnnnnnnnnnnnnnnnnnnnnnnnnnnnnnnnnnnnnnnnnnnnnnnnnnnnnnnnnnnnnnnnnnnnnnnnnnnnnnnnnnnnnnnnnnnnnnnnnnnnnnnnnnnnnnnnnnnnnnnnnnnnnnnnnnnnnnnnnnnnnnnnnnnnnnnnnnnnnnnnnnnnnnnnnnnnnnnnnnnnnnnnnnnnnnnnnnnnnnnnnnnnnnnnnnnnnnnnnnnnnnnnnnnnnnnnnnnnnnnnnnnnnnnnnnnnnnnnnnnnnnnnnnnnnnnnnnnnnnnnnnnnnnnnnnnnnnnnnnnnnnnnnnnnnnnnnnnnnnnnnnnnnnnnnnnnnnnnnnnnnnnnnnnnnnnnnnnnnnnnnnnnnnnnnnnnnnnnnnnnnnnnnnnnnnnnnnnnnnnnnnnnnnnnnnnnnnnnnnnnnnnnnnnnnnnnnnnnnnnnnnnnnnnnnnnnnnnnnnnnnnnnnnnnnnnnnnnnnnnnnnnnnnnnnnnnnnnnnnnnnnnnnnnnnnnnnnnnnnnnnnnnnnnnnnnnnnnnnnnnnnnnnnnnnnnnnnnnnnnnnnnnnnnnnnnnnnnnnnnnnnnnnnnnnnnnnnnnnnnnnnnnnnnnnnnnnnnnnnnnnnnnnnnnnnnnnnnnnnnnnnnnnnnnnnnnnnnnnnnnnnnnnnnnnnnnnnnnnnnnnnnnnnnnnnnnnnnnnnnnnnnnnnnnnnnnnnnnnnnnnnnnnnnnnnnnnnnnnnnnnnnnnnnnnnnnnnnnnnnnnnnnnnnnnnnnnnnnnnnnnnnnnnnnnnnnnnnnnnnnnnnnnnnnnnnnnnnnnnnnnnnnnnnnnnnnnnnnnnnnnnnnnnnnnnnnnnnnnnnnnnnnnnnnnnnnnnnnnnnnnnnnnnnnnnnnnnnnnnnnnnnnnnnnnnnnnnnnnnnnnnnnnnnnnnnnnnnnnnnnnnnnnnnnnnnnnnnnnnnnnnnnnnnnnnnnnnnnnnnnnnnnnnnnnnnnnnnnnnnnnnnnnnnnnnnnnnnnnnnnnnnnnnnnnnnnnnnnnnnnnnnnnnnnnnnnnnnnnnnnnnnnnnnnnnnnnnnnnnnnnnnnnnnnnnnnnnnnnnnnnnnnnnnnnnnnnnnnnnnnnnnnnnnnnnnnnnnnnnnnnnnnnnnnnnnnnnnnnnnnnnnnnnnnnnnnnnnnnnnnnnnnnnnnnnnnnnnnnnnnnnnnnnnnnnnnnnnnnnnnnnnnnnnnnnnnnnnnnnnnnnnnnnnnnnnnnnnnnnnnnnnnnnnnnnnnnnnnnnnnnnnnnnnnnnnnnnnnnnnnnnnnnnnnnnnnnnnnnnnnnnnnnnnnnnnnnnnnnnnnnnnnnnnnnnnnnnnnnnnnnnnnnnnnnnnnnnnnnnnnnnnnnnnnnnnnnnnnnnnnnnnnnnnnnnnnnnnnnnnnnnnnnnnnnnnnnnnnnnnnnnnnnnnnnnnnnnnnnnnnnnnnnnnnnnnnnnnnnnnnnnnnnnnnnnnnnnnnnnnnnnnnnnnnnnnnnnnnnnnnnnnnnnnnnnnnnnnnnnnnnnnnnnnnnnnnnnnnnnnnnnnnnnnnnnnnnnnnnnnnnnnnnnnnnnnnnnnnnnnnnnnnnnnnnnnnnnnnnnnnnnnnnnnnnnnnnnnnnnnnnnnnnnnnnnnnnnnnnnnnnnnnnnnnnnnnnnnnnnnnnnnnnnnnnnnnnnnnnnnnnnnnnnnnnnnnnnnnnnnnnnnnnnnnnnnnnnnnnnnnnnnnnnnnnnnnnnnnnnnnnnnnnnnnnnnnnnnnnnnnnnnnnnnnnnnnnnnagtcaattgtctgagttaatactctgagttaatcctctgagttaattatctgagttaatactctgagttaatactccgagttaatattctgagttaattatctcagttaatcctctgagttgatcctctaaattaattctctaagttaaacctctgagttgatcttcctagtttatattccgatttaattctctgagttaatactctgagttaatactctgagttaatac
